United States Patent Application Publication US 2026/0216139 A1 - sequence listing, part 2

SEQ ID NO: 31 - DNA, 596421 bp, synthetic construct
  source 1..596421: mol_type = other DNA
aaaaattaaaaaaggatgtgaaaagatgctactcgcttttggcctcccggagatggcgctatgagggtgacggagttaattagtgcctccaaacgccgtgtgtgagctcatcgaagtcatgctctgcacacatattatttatagcagatctgaggcatgcatggtgtttgacatttctgtcttttaagtagggggacttcaaaaagtcgtgggcatccccctaggcaaagtgcagtgggcagggaccaggcagggtgcgggcgcaaggcgaacgcgcagaccacgagtgtcctggcgcaggtgccgggggcggcggctgcaactccgcagcgtccgctcgggaggagagttcgcggctgatctccggatgccttgcagatgcaaaatgtgtctctggccagcaggaggaaggaagaggaagtgagagcagcggcagccggcggtgcagcagccggccgacccagagtgtaagtgcgtgtgctggggcgagcgggagcgggcgaggatgggcacaggatagaggcagagccacccacgccgccgcggccccacgctgggcgacagagcctccagttccccttcaatggtggcgggtcgccggagctctgatcgccgggaacccttgccgctgctgtcctgcgaccccaagcaggttcgtaaagtttcctgggctggcgccgcgccccgactcgctgacctcggcgcggcaggggagggggccgggactggggccgggaggaggcgtcctgctccgggggactccgggcgccgcggagacacttttgtttcctccctgggggcgccgcggctcgggcgggggtggccgccgcgctcggcagggtgagggctgcgggcgcgtcggggcgctctgcagttggggaagtctgagctccggggatggcgggagtgggagtgggagcggagggagggggcgctggaggtgcggcgcccgcggatgaagcgcagggcccggggcccgggagcccgccgagacatttcgaccagggtctgcgggagggggggcgcgggagggttgcgacgctggcgcggggttactggggacgggggatgtggggctgggatcttggagtcaagattcctatagagctagagaagcggctgcggctcagactcggcgtcttctcctgcactcggggatgggagggaatcccccggcgagcgcgctcgtgggagggggcggtgatgggccagaggaatgggggccaggagggccggagagggcggtctgggcagccgggagcccctgaggttctggttagtaaatactctcctcccggggacacaccggggtctccgccgagaccgagagaggcggcggggagctttgtggagcttcgtggaaatctcggcttcggagaggggacgcaccgggcgcgccttcagagaagggggcggcggcatgccagggggcccgggaatcggagcggagagtggcgactgcgatcgccggagtcgctttgaggaagaggaaatacagaactcagctgtcccgggggtgcgcgcgtgtgtttggggttgggaagtcggtgctgtgccgcgagcgcgcgcgaggcggcgtgtgtgtgtgtgtgtgtgtgtgtgtgtgtgtgtggtgtgtgcgcgcgcgcgtatgtatgtgtgtgtggtgtgtcgtcggtgtgtgtgtgagtgtgtgtgtgtggggggggtgttgtgggtgtgtgtgtgagtcggtgtgtgtgtgtgtgaccgcacagccaggaactccccgcccagtgaccctctcccgcctagggggccatttgaagttggaggcgggtcgggacctgccttgacctaaaggaccagcctcaggcttggtcccaggtagtgacccagctctgagagtccctggacggctcccgagactcagtgaatatatttgggatgccccccgcgctggatcatgggcttcccaacaccgctggccttgaatgattcgggcctaattcgttatggttaagatttcagataatctaagacgggttgaggcctccagaagcggaggcttcctgttgggcgctgccagtgacttggggatgaagctatggaagaatatctgagtgtttctcttttgcttctataaaagtaattaatgacctgtatttacacaccaaaaccctgcgagcaactttgggacatagagggatataatccttctcagaatcactttgagattgcaaaaaccggcagcagctattattggggtctcctctggccagggttctcatattatctcacctccatgcctactttccaaggttgtttcaagcattaatgtcccataatttacagatctgggggaaaataatggtaagttaggaggccagatcccctgcagaaacatcacatatttttaatttttcttatagctgaccttttgaagctttactctttattattgtacatttcctatctctggaaggctgtggttaaatgtgcatgctgccttgtttctactctgttttgtttgtttttattaggttggtaaattttgagaaaatgacctggactgctgggactcttggggaggggttgtgtcaggagggtactgaactggagaacaagaagtatggtaggtatcagggaggggcaggctcggaggcagacccggatgggagtctggggaaactcagggcctggagcagtcattgggcaagaagatgggcagttctagtgatggtcatgcttactgtccttggtaactgcaggcaccctcaccgtcttacattcttctttttcactgagttctctccctagggcctttgcccatgatattacaggaggagcttttctcccacatgtccagatgactcacttcccctgcttctttcaggtctctgtccagttgtcagcttatagggggccttccctggctaccccatataaaatagcagccagacactccctgggcctcttatgttactcagttttttgtcttagtaccttttactccctggcattatacagtcattggtgtattttgagtattgtctctctccctgttagagcagaagttccatgagggtagtgactaccttgtcttgtttacagctccagaacctggatggattcttagcatgatgtcggtgctcaataagtgtttgttgactgactaaatgagaggtggctatactgggagagatccaccagggaaatataccaggaaaatgttgcagcattagtgcaagtgagaagcccaggtaatgggcttttgcttttttcgctgtcctttcccccatgccaggccactcttcttttagactctgttctgccttgagtagactcctccctttttctgcctgaagaaaggaacagagaggtgattccttgggagattagataaccagtacacttaatgacacataaccattccagatctggtgtttcatcactctccttggagaaggtcttttaaagaagtctgtgttgctttagcctaggaggaagggcatgattgtaaggggattgaagtcagaggcatctactgtgtcccattctgctctcctacaatatggaagtgaagacaggaggctgtaagggaggctgtgtggcagatgcaggggagatgagaaatgcctaggagaagaaaaataaaagtgagaaaacattaaggtgttctgcaggtgcagctaagtcttgaacatttactaaattactatattgaaaagaagctaactcttgagtgtttcaaagtaatttaacccctttgggtgtttggtgtgagtgggtggggcgggtggggaaagggctttgaagcctttgctgaaggatgtggctgggggtgaggcaaggagctcacctgatcacacactgtgcttacttcatcaggttgcctaatgctcaagggttaaaggtgatcattcctatggaggtaacatttcccttccagatctaagacagtggatacaattaaggtttgtaactcaagcttgtaaccactttttggtgcctgaaaccatccaagtagatagtttggtttataagacattctgttgaatctggaaaacgtggtggattaagaaaccctctctgcatcacaaagcctggagtgtttgctactaattgtgcaactttagttctggttccttctagtcaaccagagaagtgctttttaagcttacggctgtaacccatgagcggatcatgatatcactttagtaggccaagaccagcagtttaaaatgtgaaagagaagagtggtgtggaaaacagcatttcataaaacagacacccagtcttaatgtcaaagtattgctcagtgtaggtaacgattttaaaaagcctgtttcaataattctggggaaaactacatttttaaccaacttgccagggattctgatgacgacgttctagagggctacaagaaatacttagctatctccttttaacaaaatactgttggtttaaccccctgcaggagatgctatttccaaatgttgaaccagatgcagttctgtcggctattgacttaacttttcaaaatgctactattggccgggcgcggtggctcacgcctctaatcccagcactttgggagtccgaggcgggtggattgcgaggtcaggagatccagaccatcctggctaaggcggtgaaaccccgtctctattgaaaatacaaaaaaaattagccgggcgtggtagtgggtgcctgtagtcccagctgctctggaggctgaggtaggagaattgagtgaacccgggaggcagagcttacagtgagctgagattgcgccactgcactccagcctgggcgacagagcaagactccatctcaaaaaaaaaaatgccactatttgtagaacttgccagtgcgctaggccctcatgctgccatcttggaggaactagaaactcaagtgacatgcttttcactttagtgatgcagaaaggcagtagctccctttgcaataactctttaaccttacttagaataaaatcgacagactatccccttttctcaccaagttttagtttagaacttttgaggtctttggaaatttactctgctcaacttctcctttcatattttacatctagtgttccccacatgaatgattctaattacaaagacagttgtaatctcttctggaggcagccacactgctgggatgcatgattaggtgaagcattttagctgacctgggcttggattggctatccaaagaagaaagtcaaaggctgacaactcagcctgggcaacatagcgagaccacatctctcaaaagttaaaaaattagctgggtatgatggcatgcacctgtagtcccagctacttggtaggctgaggcaagagaatggcttgagtccaggagtctgaggctgcagtgagctgtgatctcaccacggtgctccaggttgggggacagaaaaagaccccatctctttaaaaaaagagtctgagaacttctgcactgtccataataaaaggatcatgaaggccagtcattccacagggtgtggctcccaggaccatgtgtgtggccatgaaagccttccagtatgccagcacagcatttttaggttcagcaaagccagcctgcatgtacaatgcacacactggttgcaatgcttatttccctggataatttgggttgtttgagtgttaacaattggaacttatctatattagccagaactaaagcctgcaaagccatatcatgattcctgattacattaactacttgtgtcttagtgctgtattttctaacctgttacaatataagtgcaggtacggtacgagcagaatttggtcattggcctaaggtggggtgaacagttaagtatcagataggaatacgtgtgggagaaggaatgctagctcatcaaacagaattaactacagtaacaaactggcatagtgctgagtcgagaaattagtcacatgtataaatagaaggagacgattctcagtgttccgggcccccacaaacactgatttccagaatctgaacagaattattattggaacttcaattttaggaattgaggctacagttttgactgttttagttctaacagttaaggtagaaaacaaaactttcctcagtagaaaacactggagaggcacaacttgctggactaaggactgagatgtgttcagtgggttgtactctggatagggaatggtggtttgagggaatgaaaatcaggtaagccctataaagcattctctcagtggaggtggagtcataggatcaatgcgacatttttctctgtggcctgacacacccttcctctggggatgctgttttggaaatgatggagaacagtcagaatagtattgttatcccattttacagatgtggcttggaggaatgaaatgtcacaagcatacttagagagtgcatctgagccttaaacccaacttttctgactcgttttactgcgttgtttctttctcctgcaccatgatgtctgcactggttagttccttcttttgttggttcactggacttgccagcctctgaggccaggatgccatgtggagctatgctgcagtggtgtccagagaggctcttcactcctgtatgtcctgcagatggatgtgccctgggttgccatggtatccagggatgtcaatgctgccactgagtcctagttcttcagagtcaatccctctctttgggtatctcattctaaagttgaccttagttttgagagtcaatggattcttctctcagggacagtatgtccatcagccaacctcatgatattgaagcatatgagctagaatgcaatttattaataaaaaatgagaacagtatttgccaagaagaatgggcgtttattctttagccaacatttttcctctgtggatgagtcatggtgaaggcaaaagcatggaaccacctgggaaggaaccagttggaaggggaatatacttgacagtgttttccagctcctcataacttttgctaattctcttgttgatagattcataccaactaagaaaaccagagactggagtcctttgaccgtgatggtttctcctttgggcgatgctgaggctacttgtacggttctttttctacttgtaggctgttggccattttactgacccattatttcaggcagtgtcagcctcagtgctattgacatttcgggctggataatcctttgttgtaagggctgtcctgtgtactgtcgaatgtttactgccttccctggcctctgttcactaatgccagtacattagtcgtttgtgacaaccccagatgtctccaggtattgcagattgtcctatcaattttcctgtccccaagctgagaactgctgctttgtcttcctgtgttagtgagaccagttgtgtgttatcagatagtctagactttcaacagcagttataagtgccccagttttctccttactggttattccttagagtctaaggtggtgtattaataaatgagagggctcaccctttatgttcatttctttcctccagctctccaagtttcctttctagctctcttctctcttatactgcagttgtttctctaatccaaatgtttttcaagtttcctttccatgcatgtttcttcctagtacctgtggctgaaaaacactgtaactagtgagtttttgtctcagtttcttaacaacgttttgaattctgaccactggttactgccttaactgtaacctttacataatggcaataagataaatgaaatgagggaggtgggtagcaaagctcagcttggcttgttcagaggcctttgtcacaagacaaaggaaatgtctgtgtgggaatgagttaagtgagttcagtgcctcctcctttgcttgtcaaatccaccttgactagttggatagtaatggttattgatattccattagtgcgaccaggacattgtagcaggtcagggagaagccttcaaggtactgctttatgcgaagtcctttcccactttgtatattagatttctgtcctaatcttgccatgttaactttcttatgtaattatctgtcagccttttatttaccttctctgcttggctgctgtcgtagtccagaacaccatcgagtggcttaagtgccgtagaaatatgctgggttatagactagctatgactcccctaggcagccgccttcttacagttcaccagccctatagcaaccctccacccttccttccgccctttgtgtctttttttttttttcagttcagaattgcatttagaacgccagagttttgtgctgtggggttcagtggcagagctggatgagctgtattttccaggctgctacacacaattacccttaattttgaagagtaatccatttcaaaataattttttttttgtttttggtctctttagcccaaatgcgtaaccacagctggctttacccttggccctcagaaagcatgtggcttgggaggtagagctagtggaggagtttggtcagattgctcatttttggtcaagtgaggagtgaattccaataacactcagtaaggctggtttttatttgactcccgtccacccctccaactctccccaccccacagtttcctagatttttttttttttttgagatggagtctcactctgtcacccaggctggagtgtagtggcgcgatcttggctcactgcaagctctgccaaccgagttcaagcgattctcctgcctcagcctcctgagtaactgagattacagatgcccaccaccatgcctggctaatttttgtatttttattagagatggggtttcaccatgttggtcaggcttgtctcaaactcctgacctcgtgatccacccgcctcagcctcccaaaatgctgggattacaggtgtgagccaccacacccagcctctttgttttttctttctttttcttttcttttcttttttttttttttgagctagagtcttgctctgttgcccaggctggagtgcagtggcacgatcgtggctcactgtaacctctgcctcttgggttcaagtgattcttctgcctcagcctccccagtaactgggactacaggtgcctgccatcacacctggctaatttttgtatttgtagtggagacaaggtttcaccatattgaccaggctggtctcgaactcctgaccttgtgatccgcctgccttggcctcccaaagtgttgtgattacagacatgagccactgtgcctggcccctagatttttttatagtggacttgtgcctcagttattccaattgtgggccactctgggaagtgaccactactcagaaattttggtttgggggagtgggaccgattctttgatatattaaataataagtgctttgtacatatatgtgtgtgtgagagaaagacacacacacacacacacacccatgcagctctaataatgaaaggcctttagaagcaaagaaacaattatatcagctgctaaatcctgttttctccagtgctgtcacttttatagtaagtcagcacaaatcacatgaaattaaacattttgtcaaggaatgaatatgtttccatcatctctaggcttactccactgccaggaagcgactttgactcattagaactactttctcaattactgtccattctccaactgaaggtttttgagaaacatttgcttgggtttatatgagagaagcacagtaaagctttatttattaattgtagtatattttaaaaacagatgttgagcttatccttaaaatgtatataaatattttcaagctaaactattgctgggcttatagccctgatcataatgcttcattcagtcattcaagtcagtcaacagccactttgcttgtaatttgtatgctgtagcctgggcactccatatgtggagaaggggtagggagggctgtaacaggcaaatctgtttagagacagtcataacagtatgctaaaggtatgtttaccgtgattgcagatcacagaggtaggtgttcacaaatgaggtgacttttgagaaagatctggaaagctgagtattaagagaaagaatatgatacatccagggaatatagcaatcagggtgatggaggacagtctggaaggggctttatgtcagcaatcccaggagctgggcatttggattcagcagaaaggaaagccaaaggcttttaggcaaggaaaagatgcagtgcattccagtgagagcaacctggaggatagattagatggtacagctggagggaggggcagaggaaagatgggagctcctgctaggcctgctcaaataaatacatggtcttggtcagatgaataaataaacaaagcagtgtgcttgctgtgccaatgcaactaggagacaggttgtccagcccccgccttccagcgggtgccagccagagtctgagcagaggtaaaggaggggaggccagcactcaccgtgtttgcctgtagatattgatgacaaaattaaatgatttgctaagtgattggatttgggaaaaaggagaaggagtctttgaggtttaaagcgccataagcacatacttgttaatggagggttcagatctcctgttgagtacagcagatgggtgacttcaggtaagttagtgatcttccttagcctcagttttcacatctttcaagtgtaggtaatataagtccccacctcttcgagtagctgagatgattaaatgcaatcatgattgtaaagtagagtaccctaaaagcgttgggttggatttgctattattattgaggttattatcactgattcagtagtgtttttttttttgagacagagtctcattctgttgctcaggctggagtgcagtggcgcgatctcggctcactgcaatctccgcctcccgggttcacgccattctcctgccccagcctccgaagtagctgggactacaggctcccgccaccacgcccggctaatttttttttttttttttttgtatttttagtagagacaggatttcactgtgttagccaggatggtctcgatctcctgacctcgtgatcctcctgcctcggcctcccaaagtgctgggattacaggcatgagccaccgcgcccggcccgattcagtagtttctattcaggttctttattaaactatcttgctgaaatcataaaaagagatgcattttgtatttaattttcttcaagtgacctaggtaactgctcctaaagtcttgactagaattagtttgctttatatgtcttttcttcaagaaaacaagaggaaaggtggggttggcagggaaagaggagatgttggtcaaacccagatagaaagtttcagtcagacaggaggaataagttctggtgattttattacacagcatggtggcaatagttaataattatatattgtatatttcttttttttttttttttttttttgagacggagtctcgctctgtcgcccaggccggactgcggactgcagtggcgcaatctcggctcactgcaagctccgcttcccgggttcacgccattctcctgcctcagcctcccgagtagctgggactacaggcgcccgccaccgcgcccggctaattttttttgtatttttttagtagagacggggtttcaccttgttagccaggatggtctcgatctcctgacctcatgatccacccgcctcggcctcccaaagtgctgggattacaggcgtgagccaccgcgcccggcctattgtatatttcaaaacagctaaaagaggggattttaaatgttcccaccacaaaggaatgctaaatatttgaagtgatagatatgttcattagcctgatttgatcattccttaggtatacatgtatcaatacgtccaattgtacctcataaatatgaatgattactatttgttaattaaaaatgaaacttaaaccagtacaggagaagtaccaactgttaaaatacagacggggatgagttatgattgactgtgaattaaaataactgatgtaatgactgaagttagcaatttagggtcctcaaatgaaagctcttctaatgtgtatccccagttccatttgaactaacctgagattttactgttttattgtattattaatttttttttactttgaggggagagaatggagatggctccattggagctctttcccttttcttgattccagcttttgaggttgtttgcatttgtccaagggtgcacaggggccctgggagaaaccccatgtcattggagtaacagtgaaggagcaattgtcaggaatttcattcagttgaactgggtttcatatgattatgttgcatataaaggaggttcaatgggtccattcatgctttggaaatgtccctttttcaatcgtttggaaccttccaccaagtaggggactgttgaaatgttcattggcaggtgggtggttgtaaattgttaaattttcttctttaatctgagccagatgatcaagctgtcaaccagattagaaattatcctgggaataaaaatagaaaaataaaagaagaatgtctgtagtcccaagtgtacagacccagtgtggccccattgtcccagcacgttcaattacaccagctttcactttccaagtgcagtgggttggacaattcattttatggccacctaagtggaagccacctgcttccatttccaatcgctctctctggatgtggccggtttgtttgggtgctttttctacttattgcttcttcagaaaggcagcaactagcttacaggcacaccagctcattaagcagtagctcatgtacccattaaacagtcacttagtaacagcttttaaggagtgggttgaaaagagagaaaccttcatctagacactaaaatgccctggatagaagtatgggtgtcagagagccatgtgccaaacagaaactgcttctccaaattagtgctttgaaagtgataacttttggtctccaccttgacttccattactatagtcatgaaaatcacttgtctaatggctgtatgcatatcttcattggacctgacaaatatacagtcttcagtgtgaaaaatttctggtcactttattttacctaggagagtggtaaacatgggttattcagcaactacagtgtccgctgtgtagcaacgcctcttttctatatatcaggattggtgtgtaccttgaaatagaatccaatggtaaatatatgtttaaagacccataagaagacttagataatgaaatacagatctacagtaactcactggagagttatgttcttaccaaaatatctagcagcttaaaagtgatttcaaacatgtacccattttacagatgagggaattcaggtgtcagggaagctggctgcccaacttcacatagactcaaaaccataccctcttttctgcagcataccatatggtacatacccctgctgccaagttttcatcacttttgcctcagttgaacctgctacactggatcattgtgttgagttgagctacttggtgaaggatggcgaatgatttgctgcctcaggagtgtgtaaaagagcaccgtcggggcagcaaaccattatcccagctgtggctaaggatggtagagagaagagcgtgtaatagagattcctttaaatacccagtgagacatccttccagtcataagcgttgtcatataattattgtcaactggtttagggccatgttgaatcttttcaaatgtgttgctaaccattctagcatgtgcaagtgtgtaatgaaacagtctgagactcggcgtctggacctgggaatgataagacaggcagatgagggtgtctgaaaatacaagaagttgtgaaaattctcagatttgtttttatctcaacatatatctttaagacaattttttatgactagatcaaagcaaggcacagagaaatggcataacagtagttttaatgttgagtttcaccctttcgaaatccagaagttgtattaggaatagtttggtccatccattagaagtgataagtgctttgaagagtattggatcgtatgcagggggtggaaaccaccctaggactttagtccttggctgggaagagactgctgcctttaactttcaggaaagggataggagtattttaaattcttaattgctactgtgtgcctggatttgttccagcatttgatttggaaatattctttatttttcttctttttctttttcaaggctagtcaagtgaagtagtgggagtggagaaggaacaaagaaatctgtaaatggttaagatcaattagttgtaaacacctcggcacttggaccaaacggaaatattcatttgttaattcacaaatatttattgagcgcctgctgtgtaccatgtggtgtactaggtgatccataaacaatggtgagcctccttccaagagaaaaataggcctgttgatttcatgggctgggctgcttatacattagaggaggaagtttgcattgatcaaaggatcacacaaataagtgtgatgtttaaactctgctaagggctgttgaagggggagttactgatgctcagggcgcctacaacagggagattaatgtagtcagggaggtcagggaggagggtgaaagaattttactgggtacagacaactagcacatgaaggctgtgtaaaaggctgaccttggatgttgcaggaactggggagcagagtgcctgaggcagggagcactccagcgtggattagactggagaggaggcctgattgggatcatggggctgagcttttatcaaaagggcaaagggaagtgactgaagagttttacccaagggagtgacgtgatctgatttatgctttgaaaagatccttctggcttcaacctgtaaattttacatcatttaaaattggtcacaatgtgactgtacaatcactcctgttagaatctaaccatttctaaaagaatcaatttagccactagtgtcttctttaaattttaaacagcaatttaaaggagtgatttagcatgggtaatgcaaccacttaggaatgatgaagtacctagttctgtggttctcagacttcagaatgcttaagaatcactggggacccaggaaacagcatttttagcagcctctcaggtgatcccagtgcacgtggtcccagacttcacttttcttttctttcaagaagcatcatcctacaaagtggtgactaaaaaaaattataaacctcaaggtaccacctaatgaggcaaccagaagaggatggaacctccttatcgcccaggtttgaacctggatctgttctcccaatactggggggattttctttcagtgcacccaaaatggattctaaatcctttgagttacttttttcatttattttctaatcctttcatatgcagctgttttctcagatctgtggctcactctctgtgtgtctctgatattttacttttcatctttgtcaccgtttaataaaaatcttgttccataagtcccagatgaggttcggggacaggcaggggttctgagtgggtgggttagcctggcctgatgaggaggggagatgagaagcccctctgtagattttacttattttgccccctgcagcaggagacagcgcatgtacaggggagaaactagttcatgactgccaaaatagggaattgttttcagggacataaagactcagagacaccaggagaattcgtttttggggggctttccttgaggcaccctgctccctggggcccgtgttcaagtactgctcagaagccagcagtgagggataaggtgggctcatgtttcttcccttacaagtgagcataagaccccagaattcctaatcaggtgaaatcgggttgaagtgaatattaaggggaaacaccaagcaaaagagaagtcatgccagaggtgtctggcagtttggtgggctgggagatagaggcctctggcttcctttgtgagtgaagtgcctggaccatatgatatgtgtggatggtcacctcctctgagaaccttccgtgacttctagcatttgctccttggacacatgaagtgcttccctctgctggcattgattgtgctttcacactctgtttcatgtccttctctcttagtagcctggagggctcacggcaggtgttcccaggctgagcccataagaagtactcagtgtatgtctgcagacagaagcactattttccatgtatgtgagcactgtgtccttttaacagtcctttaaaatggttccttcgtctttgagtaagggccctggggatattgtatttagggatgcctggcatgtaactctcgctgtcctcaattttgctgaagacccaaggtcacttgttgaggagcctctgggtgttggagaggcacacggccatgcaatgccctaaccctaggaggcaacagttactgccttagtgtcattccactgtgccaaaatccactctagatataacgaacattacagaagaagaaaccaacattttgtcattgcattactctctgcagaagtattcttacttgcttgtctacttataattctctactagtcacccaagagcctacagggcatagacatttgaagaccataactggaaagaacatagaaaacgtttcttggctttttgtcccttcatccacggttcagccagtgttgaatttgaagcgtctgttttttcctccctccctccccagtgcctgtgggtgacgaggcatctgtgatacacattgggggttgggatttttaccacatgtgtggttacccacatttcgtttattacattctgagagcaccgtggccttgataatatacgtttctagactataattgcatattatttttctagcagttatcaggggtttcagctagcaattgaaacttgatagtgtcttggctcttcatctctggaacaatttatcctgatgttcaagtgcagagctgagcccatttcttataagccaagtagcacacacatggtaaaaccccaacttaagtgttctcagttcactctggaaatggagcatattcaggcctttggaaccacgttctcagacctttcatatcccctttctccctcaatacaagtacaataaccaaacaactccttgcttccccagtgtggagaacttggcagttgctgagcatacctattccaattattcattccagaacttaagaaatgtccataggctgaggtgtgggacccactgggtccactgtgaggtggacctgaactaaaacttcatagatcaggccaggtgcggtggctcacacctgtaatcccgacactttgggaggccaaggtgggtgaatcacctgaggtcaagagttcgagaccagcctgaccaacatggagaaatcccttctctactaaaaatacaaaattagccaggcgtggtggcatatgcctgtaatcccagatactcgggaggctgaggcaggagaatcgcttgaggctgagagacggaggctgtggtgagctgagatcgcaccattgcactccagcctgggcaacaagagcgaaactccatgtcaaaaaacaaacaaacaaacaaacaaacaaacaaaaaacaaacttcatagatcacctggcctccataagtccctactaactgaggccacagtgatgttttgagtattctgaaattagtgttagttcagagccattgtccattagttcccaaaacatctcattattcctttttccccagtgcacagttaccctggtaaaaggttgtacataggtcttcttggggaaggctgggagaaagattaacagaatacatttctggcagtgtaccagggtcctatttcaaagtgacccagccttcctttcattctagttgagccagtgtaaactcactataaactgactctcaagtctgaggattggttgagggaccatgactgtttttatgattcatattagacttttgttcacttgacctagaacttttccacttatacacatcaagtagaaatttagtaggcttctcatctattcccacttttagaaacactatgatcatctagccaatagtatagccctgtgtgcaagttattcttttttaaattaattaatttttttttattttagagacagggtcttgctctgtcacccaggctggagtacagtggcatagtcataactcactgcagccttgaactcctgggctcaggccatcctctcacctcagcctcctaagtaactaggactatagacatgcaccaccatgccgggctaatctttttattttctgtagagatggggttttgctatgttgcccatgctggtctcaaactcctggcttcaagttaacctcctgctttggcctcccaaagcactggaattactggaaggagccactgcacctggccaaggtagactgttctgattgctgtgttgaccttgctgtccattaaggtaactatgccacactagaaagtgctcaatcaggctttgtgcctgttgcgaggcttggtcccatttgttcccttagacacttccctgagctgccttgtgggatccagacctacacagatccatgttgaaattaatcaccacccacttgctctgtgacttaggggaaatttattaagttctcatagcttccgtttcctcttgtatagatggaaatgatgccagtgtgtggttgtcaagataaaatgaaaaaatgtaatcaacaaacagcagaattctttggcctcggccggcatacagtagatgtgagagtatgtatgagttttgaacctcttctccaaaattctgtggccagaggccatcgcgggttgaaagggatggaattaggagacaccggtgagctcagagatgcaaagaaatttcacagcattttctgttgtttgcattaagacttaaatttcaagtttgctgtgttttccagtatcgcagtttgatttctggattttggtttttggtcggttcagagaaaataaggtctgtctgggagaagcgaccatttttatacttcccataccctctgaggagtgccttttgtgagccctatttgtggacttcattcattaactcattctttgggcacttgaggccaggaaatgacgatacatgtggagtgcctttgccctctgcaggggaagatgaggtcgcagtgggcacagctgtaacgcgtggctgatactctcatgcaggcagaaacccaggtggggatggcagaagaggcctgtgtcctgttggccaaaaatgtgcttcatggaaaatgatgttcctggtggagctcttcgggaactggtggtccagacattgaatttggaatcaataggccagagccctatttttggggctgaacctaactgttgtctgtgctctccgtcaatgccaaatttttctcagctatttataaatgtggagggagggtgctaggtgtgattgatggatcccaaacacaaatctgtaggtcagtcagctgcattcagaatcatctcagcagcttgcaaaaactagaatctgggatctcatcactagaaattctgattctggagtaatttcctaaaatctctatttatacaaagactctgcaccaggtaattgtagtctgaagcccccttagggatgccctgaatatcttctatgtccctcttccctctagttccattcctcatccttcacatcctaatgccatcttaaatgtctctttcagaaaaccttcttggcctctaactgagcagccctccatagaggattattagttcatgcctctgtgcaagaaagaaaaacaaaaacaaaatgcatgagttcattcactctcccatctcccctgctggcctgagagcacctgaacatagtgatggtactgtagccagtcatctgtgcatcctctgtgctctgcccactgcctggcatgtagaatatgcccagcaggggattttcagagctgaccagatgggagagtggtgaaactgaagatcagcccttttccctgcctgtaagcacctctaggaaaagatttaagagatgttgcaaacaaatcactccaacgtatttgggattgctcattgtgatgcctgatctgtgccagcctcttcctaccacatctatgactgttacaggggtaactgttccatcccttagtctgcagcacccggaatggatgtggaatcactgaaggaggtgagtggggaagaagacaagttggatcctgacagtttaaacccaggtgttttgcaaatccatcccttagtctgcagcacccggaatggatgtggaatcactgaaggaggtgggttggaaagaagacaagttggatcctgacagtttaaacccaggtgttttgcaaatccttccaaaatatcacttggcttttcctctccatacctcctcccttgcccagttggaaaaaataacaacaacaacaacaacaacaacaacaacaacaacctgcagtacgtgtgcccacatcctcctctggatgaaatagagttgcacagagaaaaggaaagttgatttcctagttattctcccacacatggagttctgggtggcaccatcccacactatttgcatcactgagctacacactctgccaagactgcctcttaaatttaaacacattttgatgaaaatagagaaaggctgaggaagaaaggttaacacttccccataagaggtgcgtaagcactatacatcgtatgtttttcttctggctcttggattaggacagaatgttaattaaaaagtaaaaagctgatcttctgagcagcaattaatttcaggattgctcttctttcatctgttgggtctttgcatttctgaagacgtggtggaaaatatttcctaggggtctttctaatacacattttcatttgattgttttgatctttaggctacatgttgacttaaaaaggaaccaatattacaaaaagaaatgtcattccaaggttctggattctgattatcgctctggtgacacagatgagattggctccaggcatatacacattggttagctggttctgcccaatccctgtctggagttgaatgttccatttagtcaagactgccaagcagcaacataactggattcattagcttgagttctgaaagctcctcttaaaagttgtttttgtattcatactactttaatatttagggacaggctgcaccattttctaggttgcaaaagtgatcactcagttttttttttattaggtgctattttagattcaaaaatattttattttttatgaactgttttgtgcctttgacctagttctcttttcactgggatatgtatcctaagaggatgaggtttatgatattaataatacctgcattattaattcctttcaaatgaaaccagctgtctctgttcccctccaacgtgtgtgtgcacacacagacacacacacacacacacacacacacaccccaagcatacatccttcatgtagataaaaagataaaatgcctttggggtatctatggggataacttatttttctcccctattgatcagaatgcatggaggcctgggaaactctgctggagtacccaaagcctccaagctggcagacttgagcactattgtctttattgcttcttttagcaggattttcctggggatggtgaatgtgccataaagtagggcccacaggccttgcagaaatggaagagcatgccattcactgaagaaatgagctgtcagctcccttctcctcttactataatttgctacagcctggaaatgaaaagtgacagctattaaaagggcttgggaataattgcagttaaaagcaaaaatagcgatattatccactgccacttaggctcacttttacttttgaaaaggctcaatgtttggagtccataaaatgtttgcagaatatcatcctgagtcattttatttatgactaatctaaaatatttttataggttttcagccatcccatagtggtgttggttttggtggcatctgaaggagggtgatattcctatcagagtgatctgtgacacgttgcagtgttggtcactgctgacccagactgaggtgacaggattcttccatgcagagctgcaagagttctaaagcaagtgtttttcctggagggagagcaatggctttttgtgaattttagttttagaatttgaaaaagtcttagcctgaaacatatctttaaaaatgcctcctcatatctcagctaacgtagcacatcacagagatgtcactgtattctggaagttgatgtcattctttctttggaaagccatagagtcatctccgcaccttctgtgatctctgatgttcagatgtttagcctagaaactagatttgaatctcgtttctaaagaagacccccttgtggtctgaactactgtattgtcttagggggctcaggttagtgtttgcaaaggttagtttgtgatttttttctttttttcgggaaaaaagacgtagaatctttttagcagaaggatcttggataaaaatcctgagtaaatgtttctcggtgtatggcattgaaaatgagttaggtataatgctggcttttagggaatatttaaatagttttttattcattttcatgtgtcttggaaaaagaataacaaggatatccaacctgtgatttcctagatttccttgtttaggatgagactaacatgcaataattgtaagagaaatactgagtaaaatagggctgggaaatggtctttgaagaactagagtttgggaaacactgatgtaagccaaaaacctggattttgtctgtgacacttctgaggcgagacaaggactgacttgccagagtttacctgttggtgaccttgagactggaatccaaacgagatgctggtatgtttgtgaataataacaaggagagctgacctttacagagcgtctcttgtgagtggtaccaagtgatttatatatgttatctcatttagttctcacttcaggccttttttgaattaattactactagtattttattttatagcaaatacaagatgggtgtggtggctcacacctgtaacccagcactttgagaggccaagtagggcggatcgcctgaggtcaggagttcgagaccagcctggccaacgtggtgaaaccctgtctcctactaaaaatacaaaaattagctgggcttggtggcgggcatctataatcccagctactttggaggctgaggcaggagaatcgcttgagcccaggaagcagaggttgcagtgacccaagattgtgccactgtactccagcctgggtgacagaatgagactccatctcagtaaaaaaaaaaaaaaaaaaaaaaaaaagaaagaaaaaaagagggagagagagagagagaactctaagtttagagaggctgggtaacttgcccagggccatagagccagaaagagctgaggtgaaggaaggagcacacctctgtccatcttagctccctgagaatagttcacatcaaagaagatgttgaagaatggatccttttgttggtgttaaactgctaggcatgagggtccagagtcttgttctggagacttgcaaatgatgatttttatagcctcattggagtgggggactctgcctaggacatcccctgagaagttctcagtatatcagcgtattacagttggagaagactcaagtagaaatcagctttcttttgtaatattgatggttttcaaactcggccacaggttccctttttctccaataaaacccatgacattttgcagaaccaatactctgtggagcacttatttggggaacctaacgttttaaactcattttacacatgggaaatctgacgtttgtgattacttggccaaagccaaaactagctgttggcagagcttatgtcattaattaatttattcattcaacggatagacatccagtgcctcccatgtgccaagcatgctgggaattagtggtacagcattgaaccagtggacaagacacagatataaggagacacatgtaaataattctcgataactatcatgatgcactgaatgtttgtgcccacacccccacgcctccaaattcttatgttgaaatcctcatacctaatatgatggtattagaaagtggggtctttgggagggccttaggtcctgagggtggagccctctggcattagtgcccttataaaaaggacccaagagagctctctgctgctctttctgccacgtgagacataacgggaagttgtcagtccacagcccagaagagcaccctcaccagaacccaaccctgctggcaccctgatctcacattttcagcctctagaactatgagaagtaaatttctgttgttaataagccacctagtctatggtactttgttagagcatcctgaattgactaagaaaaccataaatctatgaagactggaaaccctagcatttcctgggtcttcttaaggcagagggcttgcctttttcatctttcatctttgttttcccagtttctagtatgaggcagtgataacacagcctcaataaatattcgttgaataagctgttgatggattggaatctttcccattctataacaaaatggtttattattattattattattaaaaatatataataattattagttttggtgtgggttactctttgggaagtttaaaacaaaatgttccaagaggtccccagattgaaataggtctcttggtcacccttgctaagaaacccagttctgaacagcattgaccttgaacactcattacaggacagattatttgtgaaatgagtaatgtttgaaaatcatctctgtaggtttttcggcattgctaaattgtgtcattggttggaattttcagatcacaaccatattttgattcccaggcttttggccattttgctaatgtgccagaatctctaaggcctagcccaattgctaatattgacaaattcttgaggagtatatatggtttgttcaggaataaaacggataggactcagaatcttatcagctcatacctgtaggtatggggcaatccatccatctagcaattttctaaactatgtagcctactgtgggatactgaatccctgcccatgagtactgagaaggactcatggaaggatgatagctttctttgcattatttgtttctagcataggaaaactggctaatgttcgtacagtatgagaagtttttagtccactggactggagattcggagctgcccaggtggtcagtgctggcaggaaaaggtaaagaagatcaaagcatatggcttttctactttgcctatctttttcttgaaagaatttatggctgatgaagaccattttgctctggaggaaatgatgatctgttggtggcatgcacctggcctcttagtttgctttgttgtcctgggaagtgggcaagtgccccactggaccttgatctgcattccacaggggactccctgctttagagggacccctacccatgaggtccaaggatgaccacccagcgtagcccccagcaagtactcacacacacttcctccagagcagatcatttagtttaagggaagggcatcatcactttcagagatgggtgttttagtgattagacatgcgacttctctggtagagggcatttattttttaaaaaagagaaagggtaatgaatcggacactatctgtcaaattctttgctaggagtggaaacctaagttttcccaagtccgtatttccctgagaagaaattgattttggtatgatccataaagccttgtacagtgaaataaactattggcagaaaagagacaaacacatatataaaaaaaataagaatcaatgtttcaaaaatgaaatacagtagaatactgtgaggtgtttgtttgtttgtttgtttgtttgttttctttgagacagggtctggctctgtcacccgggctggagtgcagtggcaagatctcagctcactgcaacctccgcctcccgggttcaagcgattctcctgcctcagcctcccgaatagctgggattacaggcagccaccgctgcgcctggctaatttttgtatttttagtagagatgggctttcaccatgttggccaggctggtctcaaactcctgacctcaggtgatcctcccagcttggcctcccaaattgctggggttacaggtgtaagccaccacgcccggccaactgtgagttttatttagcctcagaagtatctttagacattaggtaaagagacacagacttaatcatgtctgtagtttactgcaggttataagatgaatgtctgatgaaattatgacatatgttactgaagggaaattgtgccatgtttttccctatatattttagggtgataacctgtaacacagaagacactggtgcctcactaagagcatggcaccaggagcctgaaggagtgggacctgagtcccattttcttggtttaccagataggaaaatttaaacaagttatgtaatgcttctgaatctcaattccccatctgtaaaatgagggtaacaatacagacctctagagtttgctgtgcagacttaacaggcttggctcatgggctgcggccaataaatggtagcttttgttatgaactctaggtagaaaagtatctaaatggttttccccaagcccagagagtctgaaatggcctttggaggtatcttcagacatcatgacttcttttagtgtggcatcatgcttgtctgatttttagatttccaaagaagtcttgtagtgcatcatgactagaaaacattttggagtttacacaatcagtaaatgagttttaaaacgcttttttttctaaataggaaggcaagtgttgcctgcttcatctatttgtagacctgtttaagtgttttaaaatccatcaaaacatttaaaattatgaaagccatttgcttcatgacttaacaaaattccttaaaagtcttgtatattcctgcgaatagctgaatcctctaagagaagcaggaaaaccacacgagcttctctattaatgttgctgatgtgttgtgacttgtaccaggtcccttaggccaaagcgaagcacagattttttgggggaaaaaagctgatgaattaagccaataactccgacctcttggccagagaaatgtaaattctttttctaaactcacagaaataagactcttccagggctggaaaagactttgatgaataacgcaggctcatttccccattgaatttattcctcgatgctatgcatataatgggtagtcaataaatattgtttgcccgctttttgtagctgtttcaaattgggatgaggatgagtctgtggtgttgaaatagaggaaagctaattttcttatcctgggataggctttaatcttgttagccagatgttctaaacatgagagctaaccagtcagatgagaccacaaatatctgagttgcacaatgcaattggcttgagaactgcattctttaaaggtcatcctttgtatggggacagaggcaccccttgtctacattttgggaggataggttggcttcctggtcccactcaggtcagaaacaccactgcccatcacttttggccccagcttcttgtggttcagtcccactgcattgtaaactccaagcagaggggccagttttgaccaatgaaaatggttaacccttttggccagccctcttctgccgaagtctataatgcatggctgtttttatccctgtctgttggaagaatattcagaaatccattgcaatctagttttgataaagcctttaattttccactccttccttttgcaacttcatccatgtgctgcatattcagcccctaagaacccaggaatgaattgatgtgctgccttcaaaacagcctggcgtttaggagttgtgattatattcgagaatctccaggcttgactgttcttagctttgatatcatgaggactatcctcacagggaaagatttatagcatctggggtgagaactttaatcgtggcccaaaggaacttgtgatattttgataaggggcttgaggaagttgttggatatagagcagaatgtatttcggaagggtgcaagcaattttgagcccttctggctgatcattgcaaaatgggtgagcactgggagatcagaaaatatgtggtgggcaaggtagaaagaacgtcaaactggatgaaataagaaaacgggggaaagctatttgagaggaaacttggcatatacttagtatttgtgtctgtttttctcttgaaatgggctgttgtgttggcagaggcttctggctgctgtcagagatatgaacatctgtgctcctttgcagaaaactcaggattctaaagtgtttggtggaaattgtttaactctgccacttgctccatctcctcattaggaagaggttagtctgtactgctcagagtgtgcttttaagaggaagatgtggcttagggttctgggcttcacttttacatactgcatggcagaagcaggtttgcagcagtgaaatctgaggccatcagatacaagtgtgtagacttggtgtaaatcagtttgcttgcttgggttggaagtaagaatgaaagatgccaaattagtaaggcagttgtgatacaggcatccgaagagagccagcaagatggacaggtcacgtgtggctaagttttggaaggctttgctttagtcactgtagttaatgctaaaagctgttataaatgaccccaaaatatcagtgacaatacaataagagtgaagtatttgatcactttaaaatgcattctcctattcccctaattaattctgctgttcaccaagtcttctaacaaagtggtcagtggagttacacggggcatcagtgtctagccagcatgccaccttcctttagccaaaacctaatcccagctgtggcacacgcaggaaaggccaggcaatgtagtttagctctgtgcttgtggaaagtgtcactggtttatcgagcacagcctcaaatgttcttcctagacagtgatggatccatccacattttgtggagccccctttatgaaaataacacaaaatcaggtacaaaagtgaatggtttatttagaatgagaatgggcagggcttagtcaagtggaaggctctgaagattacggtttcttagcttcatggtaatatatctctgctcctaatgtccaagtataaaatgtgtttttccccttcttactacctaataaaaccatctttgctaggtgacccatggagcacttcgtgctgttgaagtgtgccagggcagcttattttcacattgcccttggagtgaacagtgctgcagccttgctgggaggccatttggctattggtactgagagcacaagactcgtcctgtgctttgactcaggggccttacctctcagcctctgaaagcccccagtgatttgtattaggtatgtgtaaatcgtgaaaacatcctccttctccaaagaccggtaaatggttgaattatatcaccatgcaatggaatattgcagcaattacaaatgatgataggatgttttgtgcaagggaaaatgcatataagtgaaaacagcatgatgtgaaatagtgtgaactcaattgtgtaaaaataagtaaactaaaaattactgaaataaatgatatgaaaatgttgccactggtcatctctggatgatacacatatgaccaaactttattcatctttatagtacttttttcttcaactccatttccctgcatttacaatacagaccaggcacacacacagggcctgggctgaggtgcacatggtataggtttactctgcttcctctttctctgcttcagtcagtgtaagaagacagccttggtaagcaccaggaggcctctcatctttatagttttctgcatctagcaaattgtatacaattatttaaatagtgatagttctgacacctctatgtaaatggcaatattgcagccttaatttgccctaacattttactgtttccaaagtgttatcacatattatcatatctaattttacaacaaccctgagaggacaacaaagaaaaaaatcatacatttttagtagaaaacagattaaacaaaacaaacccatccaatcacaaacggcccatgaatatattgacatttccagatagcatctccatcttcttcctcctgttctcctaattaattctgctgttcaccaagtactctaacaaaggtaaaaaatactactttcttctcaattatcatagccttctatttagatttttaattacaaatattttaagagtattattttgggttttctccgagcttggaaacctagccttgttctaccagaaaatgctttctgcatttcagctaaggcatttagaagtccacattgggtcagagcctgcctgcatcctgagcggctgtttctgttctccctgccagcatcctcctctgcgggctcagtcctggggggtaggagtggggttatgggggagtctctaggaccctgggacccaacactggagagatctcaatcacgctgggtgctcttcttccctcgactcatgttccgtagctgcttagtcttgttgcgagtacccgactcctagcctctgcagcaccctgagagctgggcacttgactcttaccatccccatctcgcctcactgccccttcactgcagaagctgcagtttgcctcccacgcttaacctgatgactgacacctccttataatacctgcgagatgacttctgtgattctgcctgcccgcatctgtgtgtttctggattttccatctccacgcttggccctgcctgagacttctgcaggtcagcatctgaccgaggttatctgagctgactctgacgcatccatggtgttgctattcaccagatacagagttgcactggcacagcacagtcccttcccactactgaagctctttctccttgccagaggtcttgctcaccccaggggcctgggcagatccagttccagattctggaatctccctacgggccttaccttattgcaatgtactgggccaggccaccagatattgcactttgaaaatctgttttgaagttgctaactgcttggagtactgtggtgctgcaggctgctgtcaggggtagaggtatggggagcagagatgcctgagctgatctagaaaatacttaggggtagaatgctctaatgtgaaaattaattttaaaaaacacactgttaaagacagttcaaaatgtgctgcactttctatctgtagcaatctcaagtccagaaaaagaaggtggaatgaaaattttggtttctgtctcttagcagataggtcaggtcaagtggaaagaaaatggaggcaggaaagagtagctggggagagcctgcaatgttgagtttgtttcctggggctcccttaacatcttttgatgaactgggtggcttaaaaccatgcagatttgttctctcacagctctagaaactagcagtccaaaatcaaggagttggcctgaaggttccaggggagggtctttccttgccccttccagcttctggtggccccaggtggtccttggcttgtgcagtatcactccaagctgtgcctccatcttcatatggctgccttcttgtgtgtctgtttttgcatgacgttttcctcttttgtttttgagacagagtcttgctctgtcatccaggctggagtgcaatggtgccgtctcgactcactgcaacctctgcctcacaggttcaagcgattctcctgcctcagcctcccgagtagctgggactacaggtgtgtgccaccacacccagctaatttttgcttgtgtgtgtgtgtgtgtgtgtgtgacggagtcttactctgtctcccaggctggagtgcagtggcgtgatcttggctcattgcaagctccgcctcctgggttcatgccattctcctgcctcagcctcccgagtagctgggactacaagcgcccaccaccatgcccagctaattttgtttttgtatttttagtagaggcagggtttcaccatgttagccagatggtctcgatctgctgacctcgtgatcctcccacctcggcctccgaaagtgctgggattacaggcgtaagacaccgcgcctggccaatttttgcatttttttagtagacatcttcctctttttataaagataacagtcctagtgggttagcacctgcccaaatgacctcgttttaacttgattatgtctgcagagacctatttccaaataaggtcacattcacagatagcaggaaaggacttcaacgtgtctttctcaggggacgcctttccatgcataacagctgcctctggtccagtctttctatcccctcttcagtggtgtgtccaccagcaaaacttctgtgcctcagtttccttggctgtaaaacggtgccctcttctaggatcgttgagagaattaaatgaaatcatgcttggcagagtatcacgctcatagaaagtgctcagtaggggtttagcttttacagctagttgcttgcagtcatttgatttcataagctaggtttgtggagaaactgaggaagtgaatgagccaaacacaaaagtaaacactgttgataggacaggtggttaactctttcagtgccacaaaacacattctgactcacctgcacacaaattttgcttacaagattgttgtcagcactaattttgctccaagtatttgcttgattaaaatctcttatgctactctttgcagctgacctataacagaaataaatgaactaactagagatactttcttcgttgggcttccatctagagctaagctttacttaggctttcaaattgtaagcaaatgcaaaataactctcttgggaaaattccagagaatctaggccttgagctgttgtaagcaaatgtggccctccttttagggcgggaatctaagaaatggagattatgcattatccagttccaggggcatcattcatactgtggtctgtgcgtgtgcatggacaagcctgctcctctgggtgaggtggccataggtcctttctggggttcagtaagttctgatagtggcattgtcatggtgtgaaacctctcattctcccagtttaattattcagtgagaatgggattcctgagattctaaaccatattccataactttggaaaatatatgtgtatataaaattttccatacggttaaaacctgagagtggactgcaagtcaaattgctattttcttccctgcttcgtctttgtgaacttcgtattgtcagttttcctgacagttgacaaaagtgggcagttttggtggcatatctgatttaggaagtaagtgcaacaatttgaaagcctaagtaaagcttagctttagatggaagcccaataaaggagttatctctagttagttcatttatttctgttgtaggtcagccgcaaatctgaaaacacaggtttgaatttgtatgctcatttaatgttactgataatctgaaatgctggtttttaggactgtagatttcattatggaatatgtttttaacttaatttgtacatgggtctcttgttgttttgggaattttgttctaagacatgttgaagctgtgctgtagttattgggtttatgagttgttggggtattatttatttttaatgtactctgttccttcctcttcccaaagcaaataatcaagaattaatgtttaactttaagttggatccactcactttatattgagagttattattactttaattcacgtttcttttccctgaagccctgatatatctttgggaagatacattttttcatgcattaattattttcttttccagtatcaattgcagatattacaatcacagcaagaaacatctgttgtacctttattatgtgccaggtactgtgctgcctgctttatatgaattattattacgatcattaaatttttatatccacgctagactttacatactgtctatcataactcacattttataataaggacttgagactggggaaataaacttgccaagtcgacacaatttaaaagtggtagagccaagagttgaactcacgtagtctctgactctggaactatgctcttaaaccctacactcttgatgttgaagatgtagggacatctttgcatttgaagacagaaatgcacatacagcccagaacttttcagtgattccaaagacctctgtattttcacgtaacataactttggaagccacagattcgctttgctcaatctattttgttcaggagtacatgcatgctaatttgctcaggcagtagctgaaagcagtgagagatattccaacaaggctccagattgcaagagaaatgagtgtggatttaaaaattaacaggctttgtatgcatataactaagaatcagcttacttgccatgaagatgagtaccaaggccccaaagtatgtatgtcagaaggtaggatattacttggttttgtgtaattggtaataccaaggtcaaatcaacttagataactggtttaaaccattaaatagcttttttggctttagatatttctcaagatttttactgcaagctacgtgcattgcagtctgcaggaagaaaaaaaaggattattagtgtttttgcaatgttcctgcccagcgtttacttctttatttgctcttgttttattcccacagggaaaggttcattgtaacatacccagggatgtgtggtagatttttccaatgcagcaggtagaatgactttgatggtaagaaacagaaaattgaatgccgactggcttaaacaataaaagcttatatcattgaaaagattagaggtatggtgagttacagaattagattgattcagccactctctgggtcatttagggtttctttttttctgtctctgccaaacaggattggactttggagttggccacagggcagattcccccaacacaccagcagggtggcgatcagagaatgccagaacaaacattagataatttttaagaagagtgacttggtgtatgtgtgccccaacaagtatccaccatagccagtgacctggatatgcttaatttagattaatgaatttatccgtcctctctcttctccaccttgtaggtgttaatattctacatgtaatgtacaggggttttccccctcggatatttttggtgaatatttctgtagttgtccctaaacatagaaagattttccagcaggatactaagaggtactgtttagcatatttcaatttcccattaccaatcccacagacctgataagatatggatgttggctgctaatatcaaataatgttttctaattttcttagtggaaaatgaatggaatgaatcattcaaatgaattccatgattcattatggaatcattcactcaatattattttgatattaaatgatattaattatattaaaatattattttgatattaaagtggaggtaaattgacttctgtcatataccttttcactttgctacttcacagtttccctctgttcttgccatgctgaagtggcctggtgtggtggctaacatccctaatcccagcactctgggagggcgaggcaggcagatcacttgagaccaggagttccagaccagaataggcaacgtgacaaaaccccatctctactaaaaatacaaaaattagccagacgtggtggtgtgcgcctgtaatccccgctatttgggcggcggaggcacaagaattgcttgaacccaggaggcagaggttgcagtgagctgagatcacgccactgcactgtagcctgagtgacagagcaagactctgtctcccccacaactgcccccaaaaaaggaaagtgctgaagggtgttttcctgagtgacatgctggaactttagatggcaagaaaaagagagctaagggcatactttgcatgttacctggatgctcatttttggccaaggggatttcttctgagaagtgaaaaatatcttcagacagtttggttcatttggtgattgtcctgcttgccaggttgtaccaactggtattttcttcttttgttcagtaaatcaaccaaaagcccactatgtgtaaggtattttctgtggattcaaagttgaacaagacttccttagccttcctggtctttcagtctggtcagggagatgagacagacacacaaataaccacaatacaaaggacgaagaggaaagctaggcttggaaaaagggctgttgggcttggaggaggcaaggaaagattcctggagagatgaggaaagtcttgtgtgcaaggggaagggagaagagggaggatttcagacagagcaagtattaagaatcttgagcctaaatgttgtgaagcagttaaaattaaaaaaaacaaaaaaaaaatttggtcaagttatgtctcctattagtgacttattattgtttaacaaatcaccacaaaacttagtggcttgacccaacaagaataatttattctctttcataattttagtggttgaggaacccaggagcagcttagccaggtggttctggctaagggtcctttgtgaagtggtggtcagatgtcagctggggctgcagtcatctgaaggctggactggggctggaggacttgttccaagatgatgtgctcctgtggctgacaagctgctgctggctgtggatgtctcttagggctgcttgagtgtccttatgacatggggtctggcctcccccagagtgaaagtttcagggagagacaatcatgtggcatcttttttctctgacctagcctttgaaatcacatagcatagcttcccacacactctgcatgttagagaggagtcactaaggtgggtctaggggaagagggttcaccttttaaggggaggagcatccaaggatatgcacccatgttttaaaaccaatacattcttgaaaaaaaatgacaagctaaaatgatggttgcattagtttttctttagttgttgtgtctgcacagtgtttaactacagtagttggcacactgtagttttttgattggtaaactatggtatatatgatgtcttcatctgttaaactagtcatttaaagtagaaattggcaatttatccaagagacatcttaccacagaagcctcctatagaagacagataaagtagaagtcaggggctcaggctgaggtggtggtgaagggggctggcacagcctttcctcagtgtccaggaggaccccacaaacgccctggctcctgagaatagaactctctggaagccatttcatggacccatccattccttcctgtgatttttttcttttggagttcagttgttcctttgaagaaagaacaaaaggatttcatgttgttttgcaaaatataattgtaagaattattttctgaattataaacacatagtttgaatgatgatgtgtagcactgaatgatggttagaataatttcttccaaaacattttgtgtgtgtgtgtttttgtgtgtgtgtgagagagagcagaggtaggaagtagttgagcgtgaggaagggactttaatttgaacagaattttctcctctgtggagcatattaattaaatatgtacttgtactgaaccataacactgtgtttaaagcagtgaaagacatgagccaccattctcagcagtatcaaagctgaagccctccatgaccatgtgatctgacatgacgttcctgctggagtgggaggcagagttctgagaagtggagaatgtgatgcttctgaattaagtgtctttgataattaccagaataacggaaaaagtttatgaaccagatcaggaaaaaatatgctcattagtcatatgaatattagttttctcaacataacaatacacttctgaggctcccccttcttccttggccccgcacacacacaaaaatgccatttctgtggactgtatggccatttctgtagactgtatgaaaagggaccctctaatacaatagagaagttggaaaagctgaatacattctctctctctaacttagcacacttaaagggcaatagccagaaaattaaattttatttaaagaattttgaggatgaaaagcacgaggatattaatttttctccactgtcactttccactttcatcactgctacaatttattgtacccacttgttcctggaaaagaaagagcataatagcttgttacagtgatttcgttttaaaataaagtgttgtaggatgttgaaaaactagaagaaaccaacggctagcggtaaatgaaagagagggaactttgtttgctaagatgtggacagggaataatattgctccttgaatttatccactaacaatccagtattaatatctgtgggacttcccatttagaatattggtaaggtagaattagttgctacatctccataattatttcttaaaatggttttctgagaaccaggaaaatgttatactacttcttgttcctacttcctgttcttgctgttccgggttttattatgaaaatgtgtaagtgggagtaaaagccaaactcttacttagcagagtgcctggtgtgcagtaaacattaattctcttcctcctctatcctgatgccttctgcactgaccccaggatccacagagggagggtgacaaaaagtgtcacagcatatagctcatgaattgcatccttttctttagttagctaaaaactctttccactcatgtcttcttccctttgcagtttttttctccaacaggaaacccactgttttttgtttctctaccaaaatgtgtcaggttgccttcctttaggggtaggccagcaggctctatgatgggccctagtttttctcattgtattagttttcccttgtttgaatggagaaagtgattagaaatctggattactgttcatttcattttcatccatgtatgtcatttattcattcatttgttcattataacatttgtagaagacccactgtgtagggctgtgtgtgtgttaaggggtgggaggggctagagcagaaggttactggaactgaggcatctggccctctgtccctgctttttagtggctcacagtatggggttgtggggagggttggagagaaagacatgaagacaagtagatacatttcaaataagcatttactgaacccttgctgtgatcaaggaactgaattaaattttatgtggataccaggttttactaaacttgtttttttctttcaaggagattatactttagtagaggagagaagacacatctaatttagcaaaactttagggagctttctatgtgtcagtcaccaaactgcaatagtactggggagttcattttttttcatgtcaattacataaaataatcctgcctatgcaaagaagttagagactctctgagctagagcaattacagcaggaattgtaaaggaagtcggaagcaaaatagtcatagtagttaagggttctgacttgggagtcagatatatctggttttggatcctggcttcgttgcttaatagctatgtgactttgcgggaaggagggagataattaccttttcaagattcagttttcctgcttgcaaaatggggattataatgataatatttactgtggtagattgtattgtccaaaatggtcatgccagtatcttttatcatacatgatcttacaatatccctgtgaaactcctgccatctagcaatagggtttatgttccttccatttgatcttgagtggaatgttgtgacagctttgaccaacagagcatagcagaagtgatactatatggcttgcaaggctacatcataaaaatgttattcacctccatcttgctctgcagtgtagctcttggaacccagccaccatgctgtgaagaagcccaaacagcccgtggagagtcccaagtgggaggaattgaggcctctggcccacgggcctggctgagttcccatctaacaattagcctcaactttccagccatatgagtgaccatcttacaagtggatcccccagcaagccccagttgagttgccctggctgactgtgcatggagcatagacaaaccatacttacccaaccctgcccaaatggtagtttcatgagaaaaatgaagtgattgttgttgtgtgaagccagtaagtctggagatagtttgttacacagcagtacacagccaggacacttgccatataaagttgctaagaggagtcgatgaaatgatacatataaatcagcataaaactagtgacccgttaatgatagctctcttcattattatcactagttaagggaagttatttaatagatgtcagcattagttcaaagtaaggtcagaacctaaaaagctacccacgaacttttggcatccagtaggttttaggaattttgttcacttttttttttttttcacttgcaaaactctgctgtgtgtcagcttccggatcacctttctgctgatattgtgctgagtttgttctgaactctgtgctttccgttgtttcagagtttcacttaggctttcggtgccatggcccgatgtgtaaacaatgtttaaacttccagattattctgtgaaagtcatgctcagggctgttattttattaaaacaatttttttgcatgtggtaaaaagcaacacaaaatttacaacttcaccatttgaagtatacagcacaatagcataaactatatgcacattcttacgcagcagatctctagagctttttcattgtgagtgactggaaatctatacccactgaaaaacgacttcccctttcccttctccccagcccctggcaactaccactgtattttatgtttctaagaggttgactactttaaataatccctagaagtataaccatgcagcatgggtctttttgtggccggcttacctcacttagcatcatgtcctcaaagtttatctgagttgtagcacatgacaagatctccttctgctttaggctgaataatattccattgcatgtatattcctaccgtttctttatcccttcatctattaatgaatatttagactgcttctccctcctggctattgtgactaacgctgcagtgtacacagtagtgccaatgttgctctgcggttattttttccacttcctaccaacagcagaatctcgttgaaatgcattggaaagacagagcgtaggggcttatctgagttctttgtcatcttttttccaatgtgtcttagacagtgatgcacaatcaggtagccagactgcccagattcttcctgggggtttcaacttcattatgtatatctattgtgtaaccggttgtgattagaattaaacctctgccaggctttctattgctttcagagcagtttcacaagcattattttattgaacccttgctgcatgatagctatttctttagtatggggaacacaaggttacaaatatagtgtggatataaaatccaatgctactgtatatgtttattgtggtattcaatgttctttaccaatgtaaaattcacttacagacttgacacaattttttgaagttactatttttaaaattaataaatattttaaaaattaatcaatttttttctaagagaaattttaggtttacagaaaaattgggcacaaagtacagtttccatatcctctctttccccagcagggcttccctcttattaacatttgttacaagcaatgagccaatattgatacattattattcattgaagttcatagtttgccttagggtttactttttgttttttacagttctatgagattgaacgaatgcataatgccgtttatccaccattattctgtcatacaaaagaattttactgtcctaaaaatcccctgcagtccacaaatgcatccctctctcactgcatattgctggcaactaccgatgtttttattgtctctatagttttgccttttccagaatgacatatagttggaatcagtctgtggcctttttaggctggcttccttcacttagaaatagcacttaagattcatccatgttcttttttttttttttttgagatggagtttcactctttcgcccaggctggaatgcagtggtgcagtctcagctcactgcaacctccgccttctggtttcaagtgattctcctgcctcagcctcctgtgtagctgggattacaggcacccaccatcacgcctggctaatttttgtatttttagtagagacggggtttcagcatgttggacgggctggtcttgaactcctgacctcgtgatctgcccacctcggcctcccaaagtgctaggattacagacgtgagccaccgcgccagaccctcatccatgttctttcatggcatgatagttcatttctttttatctcccaatactgtgtcattgtgtggatgtaccattgtttattcactcacctgttgaaggacatcttagttgcttctgagttttgtcaagtatatgttaggctactgtaaacatgcgtgcagattttgtatagctgtaagttttttcaacgctattataaattaccaaagtgttctccacacaggctatattaatttaccctccaattcagcagtgtatgtgattctgtttactacaaattcttactgacagttaatactgatgaattctttcatctttgcctatctgaagagtgaatgtgggtatctatcttactgttatattaatttatatttcctgattattagtgagtcataccattttaatcttggaaggacctttgagatcctctagctaatgctatattttaaagatgcaaaaaacaagactaagaatattttcttggcctggtgcgatggctcccgcctgtaatcccagcactttgggaggccgaggcgggcagatcacaaggtcaggagttcgagaccatcctgcctaacacggtgaaacccctcccccgtctctactaaaaaaaaaaatacaaaaaaattatccgggcgtgatggtagctgcctgtagtcccagctgcttgggaggctgagacaggacaatggtgtgaacccgggaggcggagcttgcagtgagccgagatcgcgccactgcactctagcctgggtgacagagcaagactctgtctcataaaaaaaaaaaattttcttacttcctcactttcatttttctttcctaagaatatgtttttagtttcattgcattatgcccctcattgttgtggctactgagttcagtgtctcatccaatggaaatctttcatatttgccatgagggtggaatatatacaaagagagaaaaaaaaaaaacaaaagagtaatattgcagatttctcccttgcaccaactgcagatttttcacttgtaccatctttattttcactaacaagaagcttctgtttcccaaactaattatacacagggcctgaaccagcgtgagtactcaagcattcccatgaatgatggaatgaaccctaagatgcaaggagtgggagatgaggtctgcttaacggcttgaaaatacccctagatcccagtggtatctcagctctgcagcttgagcttgacttctgattctgcctgtagctgcggtggactgggaattactgataagggaagcaagtgttgacattttccatattaggatgggttctccagtgaattctgacccatgctctcgtggtcagctctcttgaggccaactttccagaggctagctgttgggaccagcggagttgacctctggggcgggacagcatatgcactgtcctctgaggctagcaagttcaagacactctggtttcccctggaaagcctttggagtatcggaggaggattggctgggctgattcagccagtctgtattttaactgccagggaatgaataagcctatctttctgactccctccttcccattaacaagcccgacgccttgagtcccaggaagcatgccacacatgacttcagtgtcccgtgcacacagaagtttaattgctttgtgattgcctaaaatgtgaaatgaaggaacacattgcctataaggataacatttgcgattctgtgcatttcatttcatcacacatatttgtgtcagttaaagcacacggaagtgtgtttgctgtacttaaaagacctatctggattttgtgtttctccgtgatttggaagaataactgcagataagcaagctctgggtgtgacagacagacatgggggcagaggtgagacaaggtggagtctggggcgtggggagggggtcggaaacattgggcattccaggaggagggaacaatatgtgcaagggctgggacctgcaataaagcctgacctttttggaggaattcttagggttttttttccccattgttgttgttttggtcttgaagtataaaaagcatccatgccttattcttgggaaagattcattcagataaaatcccattgtcactcaaagttatgctttctcacacgaccatttcagtcccccagtgccggtggcccacattaccactgcttcattggtctggccacagtgacttctctcctggaaatgattgctcagcaaacgccttattctggcaaatttcagagcccatagttacaatgaggactcctgatcatgagctgtttgcattttattcagaaaaaaattaaaaatggggggaacaaagaggggaaaggatgtgagccaagcaatagctgaatgttttttaaaaactggatattttgtttttcatcaagtaacgattacccagttgcgaccacaatctatttagaactaaaaatttaagccagccttccaagccccaaagaaaactatggaaaaaaagatccaggaaacttttggtactggggtgtagtatctcctttttatgctaagtttgcaaaccttgctacattgccacaaagaggaggaacatctcaacactgattggcatctgggcctcgcagatggggtgtgtttctttaaacagtgtcttggttataggagaacctttattggaacaacctgaagggcccagggaatttattatataccaggttgttacttccgttaacatggagaagcatctaaaggatacattgtttgtcagatatgtcaatatcaaaggttaaaaatagcgtgggacctagggatgcaccagaaagctgtgccaatggcggggagtggccatgataggaccaaatgagaaagagcataagatacccatagaaatcatggcgcacagtcacctgtatgagacagcatgcagtgtgcatgggagaggcctgccacacggagtgaaggtggaagggggagccacctagacattcagagatgggtcttggtggtatgggagagggagtggaccagtgaggatggaaagtgctggcccaaaccttcccatgcataccttaaaatgaatttctttctggactgattagagagaaaaaatgattacaattttagggattctgtttcccacccctcattttctcttgctttttttccccattaatatattttattttttagaagtattagatttactgaaaaattgactagatagcacagtgagttccaatatatgcctgctatccacacagttttccctattatcagcatcttgcattagtgtggtacatttgttataattaaactagtatccattattatgaatgaacaacaacagttcattaagattcactttttgtgtcgtatgttctatgggttttgacaattgcataatgggctgggcatggtggctcatgcccgtaatcccagcactttgggaggctgaggtgagaggatcacttgaggcccggagttcgagaccagcctgggaaacatagtgagacccccatctctacaaagaataaaaaaaatagttgggtgtggtgatgtgtgcctgtagtccgagctactctggaggttgaggtgtgaggattgcttgaggccaggaggtcaaggctgcagtgagctgtgatcatgtcactgcactccagcctgggtgacagagtgagacccctgtcttaaagataaataaataaatgagaaagacagttgcaccgtgtcatgtagctactgttacaatatcatacagaataatttcactgccttaaaaatccacgatgcttcacctatgcacccccctaccgtcctcctggcctccaaacccctggaaaccagtgattttttttcagagttggggggatttcactgtgttgcccaggctggtctcaaaccttggcttccagtgatcctcctacctcaccctctcaaagtgttgggattacaggtgtgagccactgtgccaggcaaaccactgaactgttgactgtctttatagttttgccttttctagaatgttatataattggaatcatacaggtatttaggcttttcagactggcttccttcacttagaaatgtgcatttaaaacttatccatgtctttttgtggcctaatagctcattttaaaaattgctgagtaatattctattgtgtatctatactacagtttattcattcgtctatggaaggacatcacggttgcttgcaggttttggtaaataggaagaagaatgctctaaacatttgagtgcaggtttttgtatggacatacattttcaacttgtttgggtaaatacctagaagcattattgccagattgtatgacaagattacgtttaactctgtaagaaggtaccaaactatcttcaaaggtggttacatcattcccccttgcttttttattttccatgtgactgtagtttgggaacagaaattaaagataatatgtggaaaaatgcaggtactacttttaaggtgtaataccctgattctgaaatatccagagaagtgtgttctactgggtgagatacagactaacagtgtcctttagtataaggatattaattgtttacttaaccagaagtcagggatcagatggcttcagattcattaaatagctcaagactgtcctcaaggatccagactctctctccctctactcttccataagtatgttggctttctgtcttctgctcatacttcatggtcttaagatggcggctgtagcaccaggcatcaagttcccaaacacttaggaagaaagaggaaggggaaacaccaagagctatccttccattttgttccttttttcagaaaagtgaacacccctttaccccacgaaaaacccagcagattttctctgatgttttactgaccccaaatgggttctgtcgtcactctagctgcatagaggccaggaaacagtaatttagagtctctctaatttctgctcatggtttcttcctgtaacgatattctcactcacaacctggcctcatccatttatcaagcagaatattgctggagccacttgtaactttttgttgctgtaggggaggggaaatagcttcttcccactcatcaacaggttcatgactgaggcccctataacaaaagacagattgacaatagaaaaggatacacatgtatttgatgtaagttttacgtgccacaggagtcttcatagggaacgaaagacctgaagaagcgggtaaacctgtgtatttttatgcttaggtttggtgaagagtagacagtcttagagatgtatgattggacaaaggagctatctgtgatctaattgtaatgaactgtgagaaatttagcaaggcctgtttgatcaggttcttcttctcacttctatgtcttcaactcctttcctttgggtatagggaaggagtctctctcatatggcttgactgtgtgcccacccaaatctcatcttgaattgtagttcctataatccccacatgtcatgcgagggacctactaggaggtaattgaatcatggtggcagttaccctcatgctgttctcgtgatagtgagtgtattctcacaagatctgatggttttttaagggattctcccctgcttttgcctgaattcttctccttcatgccgccttgtgaagaaggatgtgtttgcttccccttctgccatgattataagtttcctgaggcctccttagccatgctgaactgtaagtcaattaaacttgtttcctttataaattacccagtcttgggtatgtcgttatagcagtgtgagaacagactaatacactgtctcctgaggctcttacaaagtgcttcaaagaaaagtcagaaaatccttcctcgattttatgatctgctttaggagaaaaggggtgaggggaaggtaagagtgaccttcctgcttctgctgttttctcaaatgccaaggtgccatgttttggggtggtaggtcctgaacccatcccttcaatgtccttattttatctgtgcatgagggctgaattattccatcactttcaaactgtgttttatggagccccatatttctgacatgagtgtaggcatctctgcagggagagtgaatgggatttgagagggcagggctctggcttcccacttcttcctggacaagcttaccttcacttacttaagcttcctcccagtgtagggttcctaggggttttcctttgaattaaacttctgcagataaaattaagggtgaaagcattcagtcaggcggatgtctctttcaattctaagagtcaaacttttggaccaagatgagacaaggctattagtcttgtcctaagtcctttgcaaaatccctaggattttttgccttgaaaactgtaccaaatacccatattgtgcacaggttggaagaaaattgttttttcttctgtcctaaagaaaaaggaatttctttgccatttaaaaagcagtttaaatcctagctcttccttgtcaagttgatggtctggagcggggagataagaagatggccatcagtctaagtgttattcctaaaaagtagaagttttgatctttcctggtatctctaaatggaatttatcaaatattctggagtaactgaaaggggtgatctgtattctcttccaccgtttcctaaagctctcacatgtttatgtgaaatttgtggacttttcagatgggcatttaatatacgatatagtattaatttgggttggaaaatgttctgggcttttaaagtatatcttagttaaaatgctttgtaatttgcatatatgccctgaagtaattttatggaatagaaaaatacatgaaaacaaaaacagaaactaggtctgtgctgaatttgctgttgggtgaagctgactttttttttaaattttgaaataactccagtggcttcatggtccacacagcacattgtgatctatggacagtgtaccgatgcggattctgcctgcctgatcctggaaggcacactggctttccaggcttgttggtgcagtatttaaataaatgagccctgctgtgtgcgagacaaagggcctctgtactaactgagcatatgctatctgatgttctatatttacatgtgtcatctcatttacaatgtataactccctccaaaataagtgttatcccattttgctgtgaagacagtgacacatcaaacttgtaccatattaaatagctaggaagtgtcagagctggagctaaagtctcccagaagcttgtacatttgtcactaaatcagtagctctgcctcactaaaattaactggcattcttcacaaaaatgcagggggaaaggaactagtaaattttggaatgcatttttgtgccagataatttgcacatttcaagttgtttaatcctcacaacaatcctgggagaaggaggtttatgccgtgtgtggagcgggagctatagtattactcccacttcaagtcacgggaaattgaggattgaaattatacaggaaatggtcccttgaagatcatgtaatctcccctaaagatatagcagtaatgatgctgcagatgactttaggtggtggaacttctggcctctttaccaaaacagagtcactcagcgtattctgaatactggaggccgatgtcatgcattatccaaaagcatgttgcatgttgaatgttctacccgaagaataagatgaaaggttctgatttgcctccttctccatgtacttgacagcagctagtgggcaagtgcttggcttccccaccctgcgtgtgctgggctcgtgttgggctgaggtagaggaataacatgtgcctggtgcaaggtggctatgcccagggcttcctgagagtgggtttatgccctggccctggtagaatgcaaaattggtggtcccttcagcaagaactcactggcagaaaatccttacacaaaacctaaaacttaaattgatctgcaacaaaattgcccaggaacccactgcctccactccagtcccgggagagatttgctcccatctctgtctcccttctgcacgagtttgttgaatgaaggacgtggtcccagccctcatgggcatttcctggcagagcctgggcaggctatgacatcacagcagggggcagatcaaggaggagccagaacctggaacccctgtacctctggatccaggtggctcctggatgggaaggcagagactcagcaggagagtgaggatcgccgttcacccaagaggcaggatgtggaatctgaccagagggctcagtgacaggtgccaggaaggcattggctcgttgggctggtacaggtacataaaagtacatatgggatactgctccatgccgcactaagctgtaataatgctcatggagctgggtttggcctgcaggaacagggtgccttgaaagaagccttcctgtgcttcttgggggcgaaggagggccccacattgtagatgcagacctggctcatgagtccagcaggggactgagtctagcagaagggtcaaagtgctgccccagctgaagttatccttctctccattttccgagaggaattaatgggtgttggtgcagcagaaaacttaggatgagacgatagcagcagtacacgtgagcagggggtgtcctcccatcccgcattctttcttgtgatttccctagggaaggaaacttcagcccgttagtttccttgcatagaaaggttgacttttgtttcaagtgtccaggaatctaacatcaggaagtaaatacaatcctggaaacaaagcagaaagataaacaaggttagtgaatccatcgctttctggttcctccctgagttgccttgtcttttttcttgaatggagcagtgaagagggcttcaaaagaaagacaatgcagtgattaattgaatgtttacatttccatgaatatatagattgggtttttgtttgaaggaaactttgatgtttttgaagataggaagggaaaataaaagttagtacatctttactagcatgttatgtgtcagggaggctctgtgctagagctctgtgagctcttttaattctcacaacagtcataatgaaatgtgtattattggccatcctttttaaaatttaaatttaaatgttaaattctgggatacatgtgcaggtgtgcacgtttgttatataggtaaacgtgtgccatggtggtttgctgcacctatcaacccatcacctaggtattgagcccagcatgcagtagctatttttcctaatgctctccttccccatatcccacctgctgacaggtatgttgttgtgtgtgtttttcttctccctgtgtccatgtgttctcattgttcagctcccacttataagtgagaatatgcagtatttggttttctgttcctgtgttagtttgctgaggataatggcttccagctccatccatgttcctgcaaaggacataatctcattccttcttacggctgcatagtattccatggtgtatatgtactacattttctttatccagtcgatcgttgatgggcatttgggttggttccatgtctttgctattgtgaagagtgctgcagtgaacatatgcatgcatgtatttttgtaatagaatgatttatattcctttgggtatatacccagtaatggggttgctgggtcaaatggtatttctggttctagatctttgaggaatcgtattgtccatcttgatgaggaaactgaggtgcacagaggtgatgctgcccaaagggaaatcacagacaaatagatctgaggggtccagctgcatcttcacaggcatgctgtccataacgccttttgtgcatggatgctgcccaatggggctgtcttacagatgccttttatgacccatacctttaccctatgtattcctcatagagttggtccaaagatgggcttgagccttctatcaattttctgtcaaacctttgagaactaaatatttctcttttgagcatgagatattttaagtgttgttattcaaaagagaagaaagggaaatgacaaataaaattaacaaagtctaatttgagaggtcatgaaaaaagtatttttaagttttttgtgggtcttatgttgttccttgctttgatatataagtaaattaaataaggttcagttgactatatattttgcagacattctaacctgttcattacagtttacgactgtggctgtctatattccagccagtttatttctttctgagaaaaattcctatcttcagtctacctcagtctctctttgggttcagctatcaggtagacaggtagtcctttataacataatatagtcatatttaatgttctttttcttagtgcaagcacttgatgctaccaattgtcctcttattactcctttgccaatgtcctatggaatttcatgtatagtaatttcagaatcactaatttctggctaacacttattgaactcctgtgatgcagtgtaaaggaaaaatatatgcatctaacacttggaaataggcaaataggcaaaagtataactgcatgtcccttcaatgtcatagtgaattattgtccccactcaagattatccaattctctaggggtaggtgcctttctctgctattctttaatttactgtttgctgttggttgggatattttacaatctataagggtaaatgaatacctatagaaaatggacagtgatgcaaaggattcctgtgtgatagcagtgtgaatgattcttgtccattagaaaagatagcccccaaattgccattttaatgccctataaagcattacctaggttttttatctacttcagcaatcttattttatcattcttttctttcagggactatattaatggctctgacatgcattatacattttttttgccttttttgttttgttttgtagagacggagtctcgctatgttgcccaggggtcttgaactcctggactcaagcaatcctcccatcttggcctcccagagtagtgggattacaggtgtcagccactgtgccaggctgctttatgcaatttaatcttcatataaatcctcttaggtgagcttatcattatgtctactgtgcttaggaagaaaggaggctcaaaggtgttcaagtggcctgatacaagatggatggctagtaatttagaaccaccaagagagcaaaggtttatctgaatcaaggtccactgttgattacactttgtgatgttaccatgaaaacccacattattctcaccaaggagtgcaatgatgaagtgcagctgaggatgactcaataaggtgcacaaaagaatgtagattaataaaaggaagaaataagtaaaggcgaaaaagctgagactgcctacaaaaaactatgacactattgcattttttctcactgttaatcaaaaataaagtgtacaaaatgtctgtgcacttgtttttattccttgtagcactacacagttttacttggaaagtccctatctcctacctcagccctgaatgtttgcttacagtgagtatatagagaagtggtttaaaataagaagtaacagaggtgcttgctttacattaacaaagcaaaacaaacaagatgttgagagagaagaagagccataattgcttctagactctaaccaaaccctgggttttcatcttccatcatgtaaatgtacagttcctaagttcagctttttattactgcagggtgttttcactttttctcaaggatctcatcaagttctgaaaacaaaattggttataacttactttccttaaaagtaaatatatcaagtgtgtcccatgaaattaagtcaatgatgggctgccccaattctagaattactggaaatgattagggaagcatacatacatggtaggtggcattgagagaggcaggatgaacaactcttttttttttttttttttttttgagatggagtttcactcttgttgcccaggctgtagtgcaatggtgtgttctcggctcattgcaacctccgcctcccgggttcaagcaattctcctgcctcaccctcctgagtagccgggattacaggcatgcactactacgcccagctaattttgtattattttagtagagacggggtttctccatgttggtcaggctggtctcaaactcccgacctcaggtgatctgcctgcctcggcctcccatagtgctgggattacaggcatgagccaccgcacccagcctgggatgagcaactcttaaaacacagctctctctctctctttctagtactgcaaaactactcccagctatgcttatgataattactgcaggaggtaacactgggaactaaaatgtaattaaaatactcagccttccatgatattcatccatgactgcaaactttgaccttgaaacattccggtaatcaggataaatgaaaatttgctggggtctcaagtttaagatattgggaaattgttctcgtgtctggaggtgctgagttaccaacacctgctcttctcatctacatcctgatcaaagccacccccactgccatgcacttaacccagaagccccccaggccctcctgataactctcagcccttcacttctcacattgatgcaaaattctgcagatctggtgtttctgtggaatctggtctctgtttcctccacactgttcctgccctagatgaaccctcatcagcctctctgctctggaagacacttccattgtctcctcatgtatatgcttatgccccttgcttcccttctgttccccaattattctccttctgcagatgggttccttaggttgttgtaagaatgtcttcatgatcttggcacttggcttccaacccttcagagattcctgtttcttatcagcccaggtgtaggctcttgctgaccgtctgaggcctgtctgatccagctcctgtctcctcgttctctagtctcctcccacctgtcactcaacttagctcacagtctgactgaggtcttatttacagcttctttcaggtttctgaacatgccagactatgttgagctgctccttggtgctggactgcttccccctccacctggtcaagcatctccttctcactgctgtcctgtagctttctagtaagagtattctgtgagagaccattctctcctttggggcagggtattgtccaacattatattagtgtccctgggcctaacagggagaggctccccataaatataagtggcatgaatgaatgaatgaatgagtaaaaagggggttatttcttgcatcaaaaagttaaggcagcttacctctacttagctatggaaaaattgtgtgagtaggacttaaagtattctgctatttgtccacaaaccatatcatctctcctttccacctatttatcccatctagggggcagagcagggagcacttataccatacaaggcagagaagatacagatcaagatatgcccaaggcccttctagttcagcctctccttggagtaggtaggccaatctttatgggcttgtggggatctgagcataaaaaagcaagctgaggaacaaatgaacagtgattttggtttttggataaaccaaaaccaggcaccgcttgatagcaggcaagggaaaggctgcagcttcacttttctgtgatatttccaccaaaaatgcataacctgaatctaatcagtagcagcagcaccagacaaacccaaattgaggaacaaaataaccagtctatagtcttcaaaagggtcaagggcagaggaaaactgagggaagcactttagaatgaagagactgaagagacacaacagcttaaagcaatgtgtgattctgaattggattttttttaaataatgtactataaagtactattattgggacatttggtgaaataatttactataaagtacattatcgggacatttggtgaaatttgaacgaggtcacaagggcaaatagaatgtgtattaaatgttaattttctgatttgaatgcttgtgtggtggttatataggagaatgccattgtttgttggcaatcttcactaaggtattagtgggtggtgagccactgggttggcaagttactctcaagttgttcaggaagaatgaaatttatttatattatatctgcaatttcttgtgaattggagattgcttcaaaataaaaatttttaagaaagaataaaaattaatgaacaagcttagacttttcctcatggacaagttgcccaggagagatgttttgtattatgtcctgatggaaatgtgtgcagaagtggtcttggtagaccttggaatgagttgggggtggggaggtggtgaagccaaggggcacaaccaagagaaaacctgcatcctttctcagcaaccctcaggaggtggccttaagtgcaaacaggctcagaagacagcaggctccaggggagcacagttacctcccagggcagatgcaattagcaggtttttagtgactggggagccagaggccaatttgatgatttactgtaggaaatatcatcaagaccactggtactcagactagcagatttcctccctgtaggcagacgtcaagggaaggagttgtaatcaggagagcatttggtaaacatagaatcacagtgagaagagctagccagtgtgatcagaaagtccagaggcctccagagtcaggacagccccatctctccattctatagggaggcctcacacctggcagcagatgtggaagagagaggctagagtggggctgccctcccttgtatagagctggggtagcctagcagcgccaatttgctcagatttcatggttggccacctctgcttctgactgacgtgctcatgctttagatatgcgaatggcctcagctaggttgtcaccaagttctgccaactgcaaagccccatggactctcgaatggctttgcagatctgggatcttgtgttccttctttctgggttggttttatacgttaactgtcagaggcatatgccactttattcaggttccttagagcttctccttgctaccctgtactgcctcagagaccactggccatgtgggaacttgagttagagatatgctgacctctagagtagcaacttccctctttctgttttgttttgtttcgaagtctggagccacatcagaggaaggaaagactttaaaaaaaaaagtttaccatcctggaatattttattatctctagagttctttaacttccccgggttgcagacttcctttcgaaatttagccagaatatctatatttctcatttgagaacagtgtgtctccctgctggaaactcaagttcttcaatttctgggtgcaaagtccacgcagggccattgcatgtgtgtggagattacagttctctttctacaactgaatgctttcttaggggggtacacacacttccctacaggctttgctgctctttcttgcacagatggccacttctcctgtaggccttctgggtacttagccctggaacctgtggtcccaaatcgttccttgtataaaagccagctcttccctggtgagtgttacatgggggcttgcccaaatcttgaagctcttgagtagcagaggctgtttctgaagaggttcctgaaatcaggaatgtggcatgcaagtcggcccccaactggggtctctggatggctcagtggctagagacccaccatgaaggtgtgggtccttccatgagtaacgaaggccgtgtgcacctcctggtataaactctgttttcttcaaagaatttttagagaggaagtacatatatagactggcttacactggtcgaacataagagtcctcaacttagtgtaattttatattttatattttgtcataatattataaggccttgcacacaaatgcctttataaataactacttctgggctgggtgcggtggctcatgcctgtaatgccagcacttcggggggccggggtggcagatcacttgaggtcaggagttcgagaccagcctgggcaacatggtgaaaccccatctctactaaaaatacaaaaattagccggacatgttggtgggcacctgtaattccagctactcaggaggctgaggcaggagaatcatttgagcccgggaggtggaggttgcagtgagctgagatcgagccaccacgctccagcctggacaatagagcaagactctgtctcaaaaatacaaaagaaagaaagaagtaaagaaagagcggtggggggaaagagggagggagagagggagggagggaggaaggaaggaaggaaggaaggaaggaaggaaggaaggaaggaaggaaggaagggactactttcccagaatatacctgatttgggcttgatgtgaacattgaaccacttccctctatcacatattcagttggggatgggaaacagtgtctacagggtcaccaggtcaatttggtgtcctgccccagccacctgtgtgccctggcagttgtctataaccagattgtcctctcatctaaaagtgcaaactcctgataagctcatggccctcaacacctggtggatagaagcaatagcatgggggctggggggtggtaagcacctataagtctcaaagagcggagccttggtttccatttgcaaacaaacccataagccctatatgaactctgacattagtctttgatatctgtttgatttttttactgggtcagggactgtgatgagtcctaacctaggggaccatgaaaaggattagaaatagaattactggaaacacatgctattcaaaacaggtagggcctgagtctgcttaggaacctgtagcttttgctttttttctgtccctgggcctctgtgcgtctgggagtcagaagaaaaaaaaaaggcagagtgtaataagaaatgtgctccttggggcaccctactgacctgtgtctttgtcagtcagatttcctacttgatgggaggagttctgccaccctccactctgcgagaccttcccttgcacagtgagtgcgggcttcatgtgaaaccgttcatactccatgcaagtggcgcaagcctgacagctgtgaagaaatgcttcttgggttcctgctcagttaaggggctgactttatgctcatagcgacagctgcaaaatacagatttagggtggaggcaccaggtctaaattccagttaccgtttgtgtttttaaaaagtctgcatttttacgtccatggtgcagttttacaacttgctgctgtgatagcctatacacagacatttcttgttcttttgatttttaaccaaatgatttctggaaccagagcatgggtgacttctcaggggatgaaagcgctagagaatctgaatttcaagaggtgggatagggaaggctatgagattttggaagttgggcaacatgggagagactgtgggaagcgtgcctttctgcttacggtgattaatttttgtttcaaagagcagctctccctaatgagggttgcacatgctggagaattagtaagaatctcgggggatgcccgtgcttcattctttacgcatacccctaggtagaggtggaagtatttggttcccctacactcctgacagcctatttcctatggttaaaggagaactggatttcccagcaaaagctgaatatcagggtctggagagtcctgtgtctccctactacctgtgaccaagctattattcctgcctcttcatgctccacagtgtggcaggatggaaggtttgtcttctacctggacgattcgagactctcgcttgcctgaggtgttttagcagtggactgaagtgtacacatttcaggtgacaacttcattgcttccgctagaggaaatagacatactggtctacatgtgcatcaacacaatggagggaaaaacactcaactttttaaaatagacttttaaaaacattaccaagactgcttaacaaaaaatccttttgaacttggaaagtcctttcttccatacataaaggaaaggttttatgtggctgttttgcttaatgtgggctggttttattttggactctttgaaacccagcgtgaaggctaaaattctgctctgtggaaaagtcaaaatgaaaggaattgccgggtttgggttgtgctgaattaaagtgacaaggtacagataacagggcacagccatgcccacaaattagccctctctaatttgctgctgtggaaagtagtgctttggtgttgcattgttatttctttccttgaattaaagtttaaaaaagaaagcctagtttgctcaaaggaggaaaccggaaaaatgtaagcacttcagtattgaaatagcccatggttcccatgttcagggaattgtctgaggaagttctgcttcaaaaacatggaaattatgtggttttatttttagaagcctcacttctaaaatgtgtattggattattttgtgtgctacttaaagctatccctcccaaagctcttgttgacatgcagaacgtcttttgtgtgggtcaggtgacggcggtatttttattttaaaaacttttttagagacagggtctctctctattgcccaggctggagggaaatggcacaatcatagttcactgtaacctctatctcctgggctcaagagatctcctcctacctcagcctcccaaagcactgggagtataggcatgagccatgcccagctggtggcagtcttttgtgtgttttttttttttttgcacatgatgtgccctggcatcatggagtgactgcagcatctttctccaagatggtatggggatccagaaagacatttggttttcccagccagtgtgccctgctccaaattataatactcctttttcccaattacaacttcccagaaagctgaaatgtcattctttgaaatgtggtggtacatgattataatattaccaaaaaaaaaaattagttacataaattgtgtaataaatgtcaggattacttattacaacactgtacaaaaaaatgcagtattttggtcttggtaagtcttgttttgttcttagtatttgtgtatgttaactcaaggggagacctgttgtctctgtatcgagttgtctgctcctctggtggtgggcactttcacactcataggaggctttcattcatctgtctggataataatggctaatttcacactctgacttttaaggcattgtttctcaaagtgtattccacagattgttactagatggtgatgtttaaagggttccttgcactttgggaggctgaggctggaggattgcttggggccaggagttagagaccagcttgggcaggcaacatagggagatcccatctctacaaaaaaaatgtaaaaattggccaggcgtggtggcatgtacctgtagtcccagctacttgggaggctgaggcgggaggaactattgagcccagggggtcaaggctgcagtgtgctgtgattgtgccactgcacttcagcctgggtaacagagtaagggcctgtctcaaagtaaaataaagggtcccatggttgaataaatttgagagacactaggataaataaagcaaacagattgatttcctgaaggatttttctgagccttttctatacaaaagtacatcatgacttttcaggacagcgagtggaacagacatctggtttcccacaggagtaagttcctaagtgcctgctagggaaacactgcctcaaagtttggctctatatgcctgtctggagtgaattgtgtcccctacaaaaatggtatattcgagtactaaccccccaggcccttagaatgtttccttgtttggaaataggatggttttagatgcaattagctaagatgagatcatactggagtagggtcggcccctaatccaatatgactggtccttataaaaaggggacatttagagatagaagcacacacaagaagaacacagcatgaagattggagtgttgctgctataagccaaggaactaccagaagctaggagggaggcctgaaacagacgcttccctagtgctttcagagggagcagggctctgttgacatcttggccttgtaacttctagcctccacgactgtgagacagttagtgatgctttgttaaggcagcactcggaactaatccattggcactcttgggttgagtttagtacctcagacttcttttcaggataggccagggccatatcctttgtgctagaagctgcatactcaagtgcatctctggttctttcttttctgtgggtttattctttatgctatttgtgatgttttcactggggcctgcccttacttcccattgacctggaacagaggtttcttactcttgctatatattagagtcatctggggagcaggaacaaaacaaaacaaaactactgcctgggccttgctccaggccaattaattgagactctctgggagtgaagatcaaatattttattaaaaactctgagtcaattacaatgtgcatgcaaggctaataaccactgaaggaagcagacaccaggccgtgtgcagggaagggcttggggaggaggctccaaccaaaattcggcaggggatgggaggatctttgttgaaaccgagaactctcgggctgcacgcctgactgacatgagtttggaccctggatctctacttacccgacctgactgtggaccctggatctctacttacctgacacgagtgtggaccctgaatctttacttacctgaactgagtgtggaccctggatctctactaaacctgacctgagtgtggaccctggatctctacttaccttaccaggaccaggtgcaggtagtttagctgctctctcctgtggcgtcctgatttaacacttagggacaataacgactccctaggaaggctgtcgtgagggtctgtgggaggctctgtacaagggcagtgagtccagggctgtaaggactatggggagacagactggagacctgggctcccccctccagcccctgcccccttttctctgtggtctccctaggcaggaatcatctatctctgtcaccttctgcccattttccaaacctagtccttgattcctccctccagccctccctccccagctacctgctcaaaacaattgcaacatccgataggcttccaaatccaaggcgactttctggctgcacaccgtttcttcacaaagaaaacacatttgttgaggaagtatgctaattcctcaaggaaccagctccagggctgggcatgaaatcactgtggcttgcaccactgtgggttgcaggcacttccttaaaggtgaagtcattctgggtaaaaggcaggcaactaacacagcatctgaaagacagccctggagctctccggttgaggaggggcctagatcttggtaaaatttctggctcctgcctggatcacagtcagctgtggagcacgtaacactaggacttcctggggaattggcatctccggaagctgggcctggcactggtagtttcccatgttctccaggtggttcctcaaaagctctaggggcggttctgcctctgtgaaggcagattggccgccccttcgtattttgtgtgtgtgcatgcattttgccatgtgggaagctagcgctcgctcagctgttcactcaacaaatgcttattaggtgtcaatatctaccagaccctctcctagacacgggatacagtgggaaaccaaatactcatgcttgcatgaagcttcttttctattcagggatccagaaaataaacaagtaaacaaatgtctgagatgatttcagaccctgagaagtgccatcaagaaaataaaacaggggagtggagtgggaaggacagagagcaccattttagataggagccaaatcactcttctctaaggaggtgacatttgaatggaaaccggagtgaagaaagggagtgagccacagggcagttcgggaaatgttgtgggcagctgaacagccctgtgcttggcctgctggggaatagcagggccagtgtggctggaggggagggggagatggaatgaggaacagaaaaggggccagaggccagaccatagaggcagatggaccatagctggggcttcgaatgcttttctaaacgtgatagggtgccttcgaaggttttgagtagggcagccacatgacctgacttaggtctcaaatggatcattctagagcatcaactactgtgggcaagagtagagtcagagagatcagctagaggtggacttttcggcactgtccagggagcagctaggagaggtttatgcatatgtggcaggtaaaatattacagcgaggctttaaagtaattcctagacagtgtttacgattcttagaacttcaaagcaaagtatggaatatatactttttgcatattgtcaaataattctgcatcttttcaaatgtgatatttacagtgttacctgaacatggtcacaagctcaaacgaattcgtgtgcatttttactcatgtctttttttgtgtgtacaaccgttgctagttttattgcagattagagtgaaagaagtaatttgttgaggtcagatttctgaggcaacctctcaagtagatctagaacttactgttttcttgacaaataaacaaactggaaagttcttttttttttttttgagacggagtcttgctctttcgcccaggccggactgcagtggctctatctcggctcactgcaagctccgcctcccgggttcacgccactctcctgcctcagtctcccgagtggctgggactacaggcgcccaccaccgcgcccggctaattttttgtatttttagtagagacggggtttcaccttgttagccaggatggtcttgatctcctgacctcgtgatccgcccacctcggcctcccaaagtgctgggattacaggcgtgagccactgcgcctggcctgacaaataaacaaactggaaacttctaatttttcttcaatctaattattttgctcattcctgtttataaatgttgtgccttttctaatggtttgcactttttattgcatctataacacctcattaatcttgtttgagtccaggtaattacatgtgcatagtatcatcttaatcgtgtcatttgttttcagtctgtgttactaaaagaggtaataatctgtattatcaaaataggtatgactaaaatagaattcaatagactctctaagcaacatattctataccataagtaaaatatagaagccatcaaaacctgtatgtttcggccgggcacagtggctcacgcctgtaatcccagcattctgggaggccgaggtgggtggatcacgaggtcaggagatcgagaccatcctggctaacacggtgaaaccccgtctctactaaaaatacaaaaaattagccgggcgcggtggcgggcgcttgtagtcccagctactcaggaggctgaggcaggagaatggcatgaaccggggatgcggagcttgcagtgagccgagatcgcgccactgcactccagcctgggcaacagagccaaactccatctcaaacaacaacaacaacaacaacaaaaagccctgtatatttcaaactttacctaaaacgtgtatccttttaaatgttgcctaaaataatctatgattagactcttttcccgtaacatagttacgacattaaaaggaaatgtgctagaaatattatacccaataatagaaggaataattaaatgggcagaacttaaagatgaatccccaaataaaatttccaaaaatgtaacaaaatatgtaagcagtagacacttatataagtgtgctcatttatgaaatgttttgaaatttttgtctcaaatgccgtgtaacataaatgacaagtaaaatttcattaactcaccaggaagataacaattttaaccaagtggtcaaagttaacgtctctgttaatgggacaaaccaactatatatgccctctgatatagcatcactcccgtgataggtctgccaaaaatgcataacctgactctcactgtgaggcgagatgttagataaacttttgtgattttttctgtactcttaaaaaatgtcagcgtcatgaaaggcaaagaaagaatgaagaactatcccaaactaaaggagattaaagacacagaaaaactcaatgccctaagcaatcttggattggcttttagtccagggaagcaaattcatttttcttttataataaaggacattattgggataattagtgaaatttaaagagggcctgtagattatataatagtgtgtatcaatgttaatttcctgattttgattattgtgctgtgattatctaaaagaatgttcttgttctttagaaatatacattgaagtatggaggggaaaagtggcatcacatctgcaacttactcataatacagttgaaggggaaggagaactattctgttgtctctaccctcctaggttctgggcctggggccctgcaaattagattgacaaaagacagattaacaagagatagcaaacagaagtttattagtacatgcagcatgcatacacctgggagaaactcagtgatgagtatctctgtggagtggttagaacttgggcttatctagtatcttaacaaagaaaaataaatttgcagagaagtgataagacaaaggaaaagggttttaggcttcccagggtggcagactgtgggaaagtaaatacgtggggaatactaatggcagataagggttaatttagtaaggtttgtttgtgcaggtccatcctgatgcagtctcatctcaggtgataaggttgttatccccttcctggtatgggatggtggggacacctttacaagaatttatcttctgctttcaggcagatagtgagagggccaagagcatgtcctgtttctgcttttaaaaaaattaccttcagctcaaaataattcttacgccaaagtggcgtatttttgaatggcatactctgaaccccttcacagttcagaaaaaaataatacaagaaaaagcgagataaagttactgtgataaaatgttactatttgggaaatacgggtgaagggtatactttacattcatcttggaatatttatgtatgtctgaaattattttgaatgattgactctaaactgggcttaggagaaaacattttattttctccaaaattgcagaacaccctctatcctagtggtttctaagtagtaggaaggaaacttttcttttttaaaggtaaggcaagtgtttctgagattgccttaaatgtatataaaatagctaaaatatttcaaaattatcttttatccagagagtcttgacataccagaagagtgagttagaatgaaatggaccagtaggaagtatttttctaatgtatagattgctgaattcttaaagaaaactactatataattttttttctttttctttttggctccttaggagtcaacttgaaagtatataatttaaaatattttattcccattgttcataaacttgcagagggatcctaacctttgttattgaatgtgttttagaagaggaaatgaaattttactaagaagtgagaaattcaccatagaaaggatttttggaatggtgggagtggtcaatcctggaaccctgttgaagactctctccatccctatggactgggaagaggtgtggacactggatttctcatgttctagagataaatttccctcgacattggtttgtggatggttcaagctttaactctgaaaatttttatttttccataagtttacatttatgttaatcttatggtctacattccatcatgaaaccacccattgttattgtaagtactctgggattgccttgtgaattgtcacttaagaggtagtagccagttcccagtggtttcactcttcattagtgcagggttgtatattactgactactttcgtacagaattaagtccacttcatgaagttctgcttctcaaactctgcctttggtactggaactttagtaaaccagtaatctagggggtttaaataattatggtcacccagattagagaaatggtactctgagaaaggttggttcttttcttagtaatagttgtcttatgaatgacacggactgtgaagttggacattatctgggatcagttctcactctacagcagctgggtaatcttagacaagctatctgtgctattggcagattctgtatttgagaatccagttacttgctagtatctatttgtaacccccaaatcagtgcttaaggcacttttgtggtcatttgtggatgagcagagcaatgaaaaatttgagttgcctgacgggcatgtttctagccctgtcttcttgtttcatgtctcatactgtaaacaagtactctttttgtggtctatttaatgccacgtttttcacatttttgtgctttctgttggtgatttagctttttaaaatggccctaagagtggtactggcgtgctatctaatgttcctaagcacaagaaggctgtatgtgccttatggaggaaatatgagtgttagatgagcttcgttcaggcatgagttacagtgctgttgtccatgggttcaaagttaataactcaataaaatgtatcaaagaaagtgtctttaaatagaaacacacataaaataaagttgcacattgatatgttgacaacgatgttgtgacattactctcagagggacctaactctgtattttccttcaggagcgatcatttagtgttggcaaattcagtgtttgtggtgactttatagaacacaactacttctgatagtgagaatgcattgtattcagtctttctgactatcagcttcggaaagtaacattgagacattatcagtcattatgccagggcaacacatgtaaacaaaggctatgtcaagcaaactgggtcatatggtcatcctatcccaggtaaaatggatattaaaatacctcctttcagtagcattcagcaaataattgtccatcccctatgtagccaggtactatactgggaaatgggtgtcagtgataaacaaaaccaacatgtgctctttctgcatggtgtgtatagtgtattggaataggaagacacaaaatgaataagcatacaaattatcatattgtctgtcattcaaaaagccaccaggatggctaaatagtagaaaggagagctttattagtaatatgggtttgcaagccaggaagaggaagtctgtacatggactgaaggtactctatcttggaagaggggaaggacagcttggattttatgcctcacagaattcatactacacaagagtcacgcatattcagcaggtttgggggaaatcctgtgcatattcatgagaggatccaagtgcatgcacaatgggtaaacatatatgcaacatacatcccacattcactttggggcatagttttagaattaaaacgaggtggaaaaggctctttacatccaaaggtgaactataggacacaaagacagtttgtgtgcatcctctataagctgctgaaactggcctaaggtctgcagtaccttatccaaaaagaatgtttgtgaggcccgtcctctgtccaatcagagttgcggtggcctgggttgtaaatcagatttaggagaagtctgatatctcctattgtttagaagtttagagccacaggaatttggaagtttgccatgccagctgggtcctgacacctcaatacataaaaatctttcttttcttaaccttagagtccatcttaattgataaaggggtatctgttttgatctctcagatcacaagttataaattatgaccagttctatgaagaaaaacaataagcttttattgacaagaagaagtatagaattgggaaggtggaatggtgaggcatgggaggcctctttgagaagatgaaatttaaagcaagatcagtagatgagcttcattttaccaggagaagagcttcccaggtggagaatgaggtagtctagagcctgaccccttcaaggaagatcttagtggctgaaaagtaatgaagaagaagaatgtgatgaggccgggcgcggtggctcacacctgttaatcccagcactttgggaggccgaggtgggtggatcacgaggtcaggagatcgagaccatcctggctaacatggtgaaaccccgtctctactgaaaatacaaaaaaattagccaggagtggtggtaggcgcctgtagtcccagctacttgggaggcggaggcaagagaatggcatgaacccgggaggcggagcttgcagtgagctgaggtcacgccactgcactccagcctgggcgacagagctagactccgtctaaaaaaaaaaaagaagaagaatgtgatgcaagataaagtcctgttaagaattctaggagcaatggggatccactgaaggattctgagcagggaagtaataagatattttacagttctctggagtgtatggaattggaagtggaaggaagagcaagtgaatgcaaaggaccagttacgaggctactgcaggagtccaagcaaaagtgatggtggcagtagcggtgaaaggagaagataggtttggaagagatactcacaaggtcggatctgttagttttgaatatgaatgtttaagataaaaaaaaaagatcaggaatgattttcaaattgtttgaacagaggtaccattttctgaaaggggaaatgttgaaggagaagtagatcttggggcacagagtcaagaatatagcaaattaaagttcatttacatagaagaccatctgtaaatattagttttttttttcgtttataccacggcagtaggaatttttaaaatgacatttgttccttttatctccctctttttctagagggagatttgtagattcgtgtttatcagagtccagatttggtaacccctctttctattttcgtatcagttttctggacattcttttgcatgcattaggtggacagtgagttaatactcatctcctcagttctacctctctccacaaacttctgtggttttcctggtgcaggtttcagatctgcttcaggatgccaggaagagagagaacggggagctttatctggtctagattcttgtacaggccacacagtaccccagcactggccttctgaggctacagctcttcagttcactcccaagctcagctgctgtcccagggcagagtccccatcccagcatggctgggaccatagaagcttcagtggcagccatgccatcagctggaccaacccatccatagggacctccggattttgtttctgaacttgggttgtacttctgacttctcctcccatctttgggaattgccttgggaagaaaacttttcttcttagggttgcatggtctgagggatgggggctgtgcattaactgtcaatagacagactaaaaggagaaaagacaaggtcgatttccatatgctgaagtactctttgatgagtgctacacagacaggtaaatttatataccaatttaacaaataagagtagtgcagagcttcagtggggaagtatagcaggccctgttgtgctttttgatgcttatggcaactgattttgtacttcctggtgccaaggcgctggcttctcccacatagcaaacagccttggaggagggggttcaatggtggctgaatttctcagaggttctgcttaaattcagaatactactttggtgggctgttaatcccttcagaccctaaatttgctttcctctctgaagaatcctggcccatcagagagtctaaattgaatgccaggagaaaagggctcctggaggtgtctcctatccacatgcaagtatatctaccttctccccagtgacctgctctgtctaccagagagcgttgagaggggtgaccgtcctctgttcacagaaaggtggtattccccattctacccttgttggtggtactggcgcattccatttacgtaactgtgtgaggccactgtgttgactcatccctgaacccagaagatctgcctcaagtgacttttcactttggctaccccgagacacatggcctggcaccttcactttcctgaaacttgtgagacataccacatcctatggttatagagatttttaactacagatggtccctgaattcaacttaagatttttgggggttcagtggtgcaaaagcaataagcattcggtagaaactgtacttcaaattttgaattttgatatttttctaagctagcaatatgtggcgtaatactctccaaaacttgcagtcagccatgagatcacatgattttgcccacctgtaggctaatgtaagtgttctgagctcctttaaagtagactaggctaagctataatgaatgtcctgtaggttaggtatattacatgcatatttcacttatgatcttttcaacttaacaggatataactccattgaaagtccaggagcattggtaatggattattaagggatgctgtgagttaccagttcacagatttcttgcaactttttaatctctgataaatgaaaatgttacactccagtgggttcttcttgcctgctacacagataaagccaaaacgctgagacggtggtgttgaaatagggaatgagtttagttatcacaaggcagccgagcaggaggacaggagatatttctcaaatctgcctctctgagagcttggaggctagcgtttttaaaggacaatttggtggtcaagaggctagggaatgagtgctgctgattggttgtagatgaactcacaggagtgtcgaaaactgtcttcatgcgctgagtcagtttctgggtgggggttacagtactaattgagtcagttccttgagatgagtcaggtccctgaggtggtagtcggttcaccagaatgcaaaaaatctgaaacgtatctcaaagaccaatcttaggttttacaatcgtgatgttatctatgaaaacaattagcgaagttataaatcttttaacttctggcaacatgacttctgagcagtaagcaagctagggaacaatagctggttatcacttacctatgcaggtactcaggcccctcccatagttagctttgtctatgcccaggaatgaggaagggctgttcgaagcaagatggagtcaggtatgtcagatttctttcactgtcatagttttttgcaaagacaatttagaaaaatgtttaaaaacagtgggcactaggtcaggtctgtgatcaaaggtataattctataccttgctaactgaattggttcatcacttccttcaagagctgtaagaatcagtgttttttttgtttgtttgtttgttcatttttttaaagtttttttggctgtaagtttattcaatgtgaaataatcctctccagttttactgaggtggctgaccatgttcacaaccaaatcctcctctaaactggaattcagttgctgacccagccccagcctctactttcttgttggcaccaggaggcacagcagcactatgtctgcacgtatctctgttggcttcccctcttgtgagtcttgcaggttgctcagtctccagacctttaggccgaggcctgccagtctctggacggctgcagtgtacagtggcaggcacagtctccagggtcagatgaaggtaatcactgagatactggataccctcattggtaaggtaccagtagaagtgtctccaggcaaactgttccttcacacagcctcgggacttgagagactgcatggccttcatgacctgaaggttgggcacattcttgtctgccagctcctggtgcttaggcatgggggacatccttcttggccaccatgactccctccttaaaaaggagtttataaatggcaatctggttcttcttaggcatcaacatcttggtggctctggggtccggggccggggcttgaatcatacctgactccatcttgcttcgaacctcacgggctgactgcccttgctattcctgggcataaacaaggctatctatgggaggggcctgaattctgctaagacctgcataggtaagtgataaccagctgttgttccttagcttgcttactgctcaggagtcatgttgccagaatcaggtttttggttaggaaccatttaatatttgtttactagattacaaaaacagaaatattttctttttcttttttcagttaccaagtgtttagcaagggaaatgtaatctgctacaatatgattatgccttctcttgaacactgtgttgcttctagggagaggaaatactagaggaatcaggaagatgggaacaaagagcaaaaaattactttgtggagttaagagattttttctttcttttcttcttttttttgacagactcttgctctgtcacccaggctggagtgcagtggtgtgatctcagcccaccgcaacctccacctcctgggttcaagcaattctctgcctcagcctcccaagtagctgggattacaggcatgcatcaccacgcccggctaatttttgtatttttagtagagacgtagtttcaccatcttggctgcactgtcttgaattcctgacctcatgatccacccacctcagcctcccaaagtgctgagattacaggcgtgagccactgcgcccagccaagatatttatttatttatttatttattttgagatggagtctcgctctgttgcccaggctggagtgcagtgatgcaatcttggctcactgcaacctccggctcctgggttcaagtgattctcctgcctcagcctcccaagtagctgggactacaggtgcgtgccaccacacctggctaattttttgtatttttagtacagatggaatttcgccatagtagccaggatggtcttgatctcctgaccttgtgatccacccgcctcggcctcccaaagtgctgggattacaggcatgagccgccactcccggtgccaagggatttttttaaacgactaactaatgttcttttttatctggcaaccagtaatgatgcattggttatagcatatataggttttagcaagatttcaaaaaaattattaattctcggacaacatggagaaatgagagctggatgctaatatagttagacacgatggttgcataacaacagcaaaacctcagcctcccctctccttctctccctgtgggtacttgggtgaccctgagctgatgttcagctaggactcactggcatactggtgttagggccagcattcattccgatggatcattgtgcaccctgtattgttgttaaatattttaaatatgctctcagggtgtaataaactagagctcttgggaaaagcagaccaaagctgggccacagccacgttagctctctgggaacttcatgcatggtgcccacaccctacctctagttaaaatgagaaacaacaataaaataagtaacgaaatccaacactgtacattttccccataatgatgacttcaatatatctttagaaatattaagtaacaaattatgttttattttctcattgattgggtgctcctgctttgctggtgccttaaacatgagcctttgttgagctcagagtaggcctccctgaggcagcaggcaaaggagagaactgagaattaaggatttgttctgtttatattttgagcttccattggtagttgtattggtttaaagtgagtgcaaattgtttgcacagccattaagcgtttatgataatgtattgagttgtttaaaataaaagcactgctaaaattaaaaaattaaaatagcaccataaacaaataaggcttggattttttttttttttgagatggagtcttgctctatcatccaggctggagtgcagtgggatgatctcggctcaccacaacccccacctcctgggttcaaccttttctcctgcctcagcctcctgagtagctgggattacaggcatgtgccaccacacccagctaattttttttaatttttaatagagactgggtttcaacatattggccaggctggtctcaaactcccgacctcaggtgatctgcccgcctcaagctcccaaagtgctgggattaccggtgtgagccaccatgcctggccaccttgtaattcttttaatggaaaaataaagcaaaatactcaacagagagggatttactacagaagtgtaaattgattaaactaccgcttttgcatattggattggtgaaatgatttgcttttcactttaggttaagtgtgcctttcccagaaccgacctctgctagcgccgtcttcagtgttacacctgattccgtctcctgctgcaccatgaaatgctgactctcaaggcagacaatgggacaggatttcagacagaaccatttacctgcctgtgtgatgtttccctgtaggtgacacagcacgggtgccacttccgtaccagctgtggaagtctggctcttccctttagtagcctcaggatacagggctggttctggcttcatttaccatcattaagagcctgtctgactggaagagatgttatctcatgataattgttcccttctgctcattgccaggttggaaaaatagataatggtgaaaaagtatgttgagaagcaccaattgccagatcccctaatgagtgaggtattaatctagaaatatagtggaaaatttcctttaaatatgtaaactagactgaagggactggcagaaagtagggtgacagttgtttatgaaattattgcatttttattagtttgaaatacacttgcatatgtttctgttagccctggggaagagagaaaattttattagtgtaattcaaagttataaaaagcactcattattaaattgctataactttaaaaatgagatacgtaagttaggagggataaaaagataaatgcctggaaaattttattttgacctgcttgactttgtgaacttagaaaataataatgatcatttattgagcatgtagtatataccagggactcattgtaatcatttaatcatcacagcaaccctatgagttatagcagtattattcccattttacaaatggggaaactgaggcctgtcaaggttaaccgatttacccagaatcacctggctagttagtgctagatccagggttctagccctggccttctgacctcagaggttatggtcttcattcttcatattttaaatgcctcagtcacttaacttttttggggtagtttccttatttttaaaatgtgggggcaagactagattctttataataaattagagttttggaactgtgctatctttttttttttaactgaaactgagcagaggcaatgttcatcacatactcactgcaaaaggtcaagagaatgactaaatggtaattaccggcagtatttgtagcaatttaagtcatttcaggattttacctttgacagttattagttattagttttagtaacagggacactgagagaaggtatttcttggtctacatctcagttgcttcctgatttctctctgaaccaacctcccccaacccatctctccctggagctgccaaataatcacacctcaagcaacggaaatcggctgctcttcgcaactcatcaggggagtgatgactaaatgcaggggatgagtgagaagagggaattcaggcaacgattaagaagcaggccactaattaggagaaccaggagagtctgctgttatcttgtgctattcaatctggaagttactaaactctaccttagtagaaaatgtgcgcctgacttctttaggaaagaaaagaaacgttcgttagcagatcctagattcctctagattgcttggagattcctaagacatagccaattgaaatatatatatatgtactttcatatttattactgaaggaacccccccattttgttactgtgcttaagtttggtgtttcacataagttttccgagtaaatgaaagctaaaactaaatagttcaaaatagattataatgaaatgttaaacctttattaagtatatgatacaagcaaatgatgctttagaacatctatgcattgtttagtgaagaattataagatgaagatccatgtacccatcatgcagcctaagaaatagaatgctagcaatacttttcaagcgtggatcccattctcttccctaactcaagtaaagattgctctgaatattttattagtaatctctttgttttattttagggttacacaaatacaaatgatttttttttgcaactttataaaaacggaatgattctaagtttttcagtggcttgttcagtattaacattgtttctgagattcaactatgagaatgtagttcacccatgtagatgtagttcatttttattcttcagagtatattccattttatgaatatgggacagttaattttttctcaggagagatagacatttgtttgtttccattttcttgctattaggaggatgttgtaaatatttttgtccatctctcttagtgtagatgagcaagagtttttccaggatatataccccaggagaggagatgctgtgttgaaggctacacacacctaaaattttactgggcaatgccaacttgtttccaaagtagttgtgccaactttaattctcaccaggagtacatgaaagttcctgttgctccacatacttgccaaaacttgggggctgtcagattatatacattttctagccttttgggtgtaaaatggtgtcagcttggcggggggtctctgcattcctctgattactaatgaggttgaccttctttttataggtttattgaccttcttgttttttcatgaaatgcctggatatgccttttgggttgcttgtccttttcatattgattcattggagttctttatatattttgtgtactaaatctttgttcattatcgatgtcactgtagaggcagaaatggggtgatcccttttctccccatcataagagtcatagcccacacctttataacaaaatatagatcaacaagagaaaaacgtaacaagttcattaatgtacttaaacacgggagccatacaaaacatatgaaaactcaagaaggaaccagatggttgatgcttaaatatactggggagaaggaggtggagagccgtaaatgaatgggccccaaaaaacacaccagtggtttgtaaatgattctctttggactctgaatgggacctaaggataaatagtagctgcagacaagttacaggaaggtaagggcagagccgcattgtgaacaaaggtcttattatgcagataacagtcttccaggtcttcacttggaattgccctcaggagagcagaggcggaggctgactgggcgtggtgtcctgagcatagagacttctagtctcttctctggtggttaatgtttcctggttatttaatgagattcctagggaaggagttttgaggcaattgcatttcttttagaagttttctcaatcagataagggaacttaaagagagagccagtcctggtgcttcgaatagtaaggaggatcagaaggagtagggagacgtcagagggagaccttgaggctgcttcattagttcagcatgtcaaagcaccatatttcagggcgttttctgagccccaccattgaagatatcttctctcaatatgtggtttctatttttttattaaaatttttttgttatattttttcttatcaaacctttggataagcagaaattcttaattatattgtagatggattggtcagtctctttttttttttttttacattttgggctatatatagcttgcttaagaaatccttcttacccgttggttattaggatattcttgtatcctaagattttctgagatgtctgtttttctttttcattcaaatagttaatctctggaattgttttgtttaatgtggattgtaaagtagaggctgatttcattttgccccctacattgtccccatgccacttattaaatacaggttgagtatccctaatctgaaaatccaaaatttgaaatgcttcaagatgcaaagctttttgagtgccgacatgacactcaaaggaaacgctcatggaagcatttcagatttcagatttttggattagggatgctcagccagtaggtataatgcaaatactacaaaacctgaaagaatctgaaatctgaaacacttctggtcccaagtatttcagatgagggattttcatcccttccatctcccccagccactggtctgcactgtcacttttggcacatatcaagcttccatatgagtgaaagtcctccagactataaatgttacataaccttgttgacatctttataatattgggctctcttaatcttaaactttatatgtttatccgtttattttggtgttctttaatgtttttcaataacttttattgctttatacagaaatatcttgtaaaatgccgagagggaaagcttctcccttcatctcctgaaggtttgctgaaaatatactgacaaaaggccaatgaaaaggagagaaaggcatacaatgtatttaatgtgcacaatgcagggaatcacatgagaatgatttaccaatagcccaatgtagtccagatgcttatatacccttctatatgtgggagagaggagacagagaatgtgcaaataagtaacaaagttcccctgagctctgagggaggtgtcaggaaggtgagggatggaacttcactgtgagcaaaggtcatcttatgcagataaagcctcccaggtaatctatgagagttgcccttaggagaatagatgaaaagcctgtccagatgtggtgatcttcttttcctgggtggttgatctttttgggctatttgatgagattcctagggagtggggtcttaagaaattccaaagagagtccctcccggttctttgggaaagaagatcagagacagggaggtggaagcaggtcagagagaaaccttggttctgaggcttatttctgaggcttttcacttttcaaagcacttagcatgccaaagctccgtattgtgatgaatcattttctgcactccaacactatcttcttgttttattattatcatgaaatgtatatttaagacatagttctttctgatgctttgttcctggtgtatagaaatgctaatcactttaatatattgatttatactcagaaaccttgataaagccttattaatcctaatagtttctgatagacaataatatcatctgaataatgaaaaatttgccaccccccttcttaaaatgtttagaatgagatttccagtacaatattgaatagaggcagtgatatttgacttccttgccttgtttttgattttaaaggaaaagtttgatggctcacagttgagcatgatgattgctatagactttctgtagatatcctttaggaaggaagctttctgccattcctaatttgcctacgttcctaagatgctttaaaaaattatgattgacttgtgtattggtcctgtttggcgatagcagaaaggagttacatttattatccgtgattgttttcgatgtctgccatggatattagtggggagggaaagataggaggaggtaatatatgcttattatatacttattttctgattgctttatatgctataaaataatttcatgcaaattacctcatttgggttattgtttccagtgtcttttgtttgtttgtttgtttgtttgtttctggtagggacttagaggattctgattccataactgtggctggtcttatgcccaccagtttttcctaccacacacgggtgatattcaatttgcactatgcttaattaacctattctttcttccttagtcttctctagtcttccatgtcacacacttagtgaattgtacctgtagcctgttatttttcactgtactcctgaagaattttcttaaagtaactaagaaatcaatggtgcccttccattctgatccttttcttccttcattcacttattcacttgccagatattcattgatagcatactatgtgaccacaggtaaaatggtgaagaaaacatccctgccctcatagagtttacactccagagtggaattaggacaataaacacatagaccggtgtgtaacattgcaaggtagtgatgcggtgagtaaaggagtgagtgggagagagaaagagagggagggattactgggaatgtgtgtgtgccaattttactggcattaggttacctaggaaaggcttccctgaggagatgacctttggtctgagtcccaaatacagtgagaaagtcagctgcgggaagttcaggaacagcagatgaatgacagtgtggtgtgtctggggaacttgaagaagtcaggtgtggtcaccagagagcaagacaggagaaactggtaggggacagagaaagagacagaggccaggaaatgctgggcttgcaacattctcattagagagattttgcttttattgatgtgatgaaactatgtaagtatattttagtagcacataatatctttgtttactttctcaaagaattcatcagtctgttatctgatttctgggaataagaacgcatcctgggcttcgctcttgtctcagaatctccaaactcagtgattgatgggaagaagcttcttgttaatatttttgaaatgaataaagaatctctctttctccgttagaggagttcggagaatgctattgctgaagttggcctggctcactgcaccatgttgggaggtgatgctacaggggggagattacagaggaataagccagcattgagtttcctttgtggtagaggctcattgtgtgaggacgggagattctcagtctgacttccttctccaggtagaaacatctaacttaaccaagtgtaaatgattcatgtgtgactccataactttgtcttgcttgtgctcctgttctaaactctaggtgttgggagattggaatggatctcattttgaactggatcttaacttctttgcttcaatcccctgttgataaaatgagattatacagcaatatttgctgaccttcctcacagagaccctacgtgtgatgaagtgatttacatgttgaaagggtggtttgttttcttaatatatgagaaatagttaatgctaaagtctgatataaaacgattattaataataatttttatttttactttatgtaatgtaatttaactctgaagaaaaaaatgctggatattcttttgagaccaccgaaaggatatggcgatagtttcttcctttgtcttgtagaagaatacatgctatagaaatcgaggagcaaaaatcagagcattctttctgaattttctttctcatcttttagcccctttgaatatggtgtgattttagaaacaacttagaatttagaaacaacttctaggtcattttaataaacttgggaacctccttggtggagaggtccctgtaagtggtgaatggaagtgaaatcttatcttgggcattcatctatcagatattttcttattaatgtagtggctgtactctttagtaggttctacaatacatattagccattttacattttcttacttgtgaaacttaaaaacactgcacacatttgatactacgacagtacaagagggagaatggcgcttatgataatactttactatgtctctgcctcgaaaaagtaaatagtgagttggaataattgtttaagtgactgaaagaaaggaacctactattcaggaaagaagacttttcagattgtctgcgttgattaatgcattggttagttcttcaactccccactttacctcagaagccacattttttcctgtgttgtcttcaccctgggtttgaacttctatgatggctgaaatcaagttttggtcataagaaagaatgactgagatgagtagttggtgtttgagagctggtgctttgcccatgatgggtagaagaaggcttctcttctgctttttccagcgggagagcttcttcaggtccactgttgagcaggtgtcctgctacccgttctgttctgcagtgactttggtgttggcccacaccaactagagggagcttgggtacagggttgactctgtggagctcggaagctcctgggtccactcttatcttgcccatacttcagtaggatcccctgcagccagcctgggaattgatcggtgctcagcaaaacaacctcttttattttccagtgtccttttgaaagacccttctctctgtgaagtttcacagcctttgattgctgcaagaatttaggaccacatcatagaatttaaaacacaaagtggaaatgtggcctggtgttagaagttatttccgtaaggcggaatggctgtattttccattcggtgggaatggacaggaaaactgctgttgcatttccattctccgcaggctcagatggaaacgtgtgggggtgaggagctttctgtttgataaaagctaaaaagcccactcgcatttctaacctttcaagttatgacagtcattcacgactgtcaaatataatggcattttagacatcatccaggaatcgttaacaggttccaagtgccttggcacaaagagtttacaaaaacattctgagctttgttaagaagacacttctgacccaccttcaataggattcactttttgtgttatctttctatcaatggtaatagaaaagccgatatccttagttgtctggtacctgaaaaacaggatatatccacaaaagcacttgagtttgctctccttcctcaagcaaaacttgccaaattttaaaatggtgaaatgagaagaagaagaaatttggttttgagttgaattttccctatcttaattacagaaggtaagtattctgaaaaaaaaaaaaattaagccagcattaaagcattaaagcatgccttctagaacctacaagttattttcctatgtgttaaaggttttgaaaacaagtgaagaagtctctttctcccattggatgaacatttaggtatttaggtgaaagcaaaaatgatcaagtgtgaataaaactcttcaggagatctctagtttaagaataaatatgtttcaatattcttgcttgttgtctgaaactgggaacaattttagtcatagatttaacatcatatttggcagaatacatatttggcagaatacactcaaccatgggagggtcccctgtgtctctctggagtctcattttatattaataaaggcatagatgaaaactgcttagagtctttggttctgaggtaaacactgattgaggattgaagtttggcctgctgacagcatggtcagcctttgcctgtatattggcccaggtatggggtatggtgttgggggtattgtctgacttctgtggggagaggactcctttatgtcagagaggcctaaggccctggcagagtgttagtcagaaatgaattgagagagggattcctgagggatttgcattagtcaaatgaagaagcatgggtgagagtgggtggtgttgcctgtggggggttagagtccttctaggcctagggtgtgattttctactgaactcttccctggcttctttggttttctagtcacttggtttaatttttctaccctgattcctaagccctggaggtgtcttccttctctttcaacttctaccaatgtttagatcttatggtcacgtgatttctgagaatttaacttcatagcttatcctcttgtcttctgactcaaaggcaagcacattcaagatttatttttccccttctagcaaaaaatgaaaggggagaagtgaaaggaggtaggtgtgctttagagtgatttcaagtagctgggcgtagaaagggaaaatggagaggaagagagactacatttcatcgtaggagcttggcatgtttgggcaactgagagagggctggagccactgatgtgggatggggataggagagaggaatgaggtgagggagagagagatggatggatgcgcgggatgaggtctggacagttgggccctggttagatcacacaggcctttgcgggccatgttaaagactttggatttgagcttgagagcagtggggagccattgaagggatttaaacagaggaggtgtttgaaagtctttgtggtttcgactttggtggctatgtagagaatagatctaagggctcttgcaagagcccaggtgggaaatgttggtttggcctagggaatgtttgtgagggttgagttggattggtggtggcctggacatggaggggagggagaaggactgtgaaggactccttggtctggcacaagcacctgaagtcatcagagggccctgaagttgtcagagggccccgaagtcatcagaggaggctagttcatgctctgacaacagcatcttcaacatttcaggttactgcaacagagtttgctgtcttgcaaaatctgctctaagtccaagtgaccctccagggcagctgtcctcaaactcaatggtttagtctgccttccatatcagtacacgttctaccaaattcactgtggcaagggaagagagaacctggctctccagtgcctctgtcacttccactcacatgtctttagccacaagagtcatatgtatggctgtggccttatcctgcaagggggctagaagtgcagtcccctagagtgctcagaagaggggaagcaggaaatctggtgtaaaggtgtaccacaaagccattttctaatgtgaggaatctgaaggaaaaatagcttctggaggaaagagttcagtttttgatatgttaaatttgagatgcttgtgagatacctaagtagctatgtcaagtaggcagttggctatttgagggagggagggaagaaggaaggaaggaatgaaggaaggttggttggcttgggttcaggatatacatttaaaatgtatctatgggattggatgagactacctagaggcgatgcctggagaaagacaaggactcagaaatgagccctgtattagttagtctaggctaaactctgtcgtgggtccaagcaatcttaaaagtgctagtggcttatcacaggcttacccatgccagatgtccactgggggacagtgggtggccctgtcatattataactgtaccatctgagcagaaactttgtgttttgtgttcaatgtcttgtgctcaatacctagaagcatacctggtgggaggtagtacctggtaatacctggcacaaggatgtaacggagaaattatatatatatatatatcatatacatttctattgaggtacaataaaatcaattttcatttagtgatactgaccaatgtatgtagtcatgtaaccatcacaacacagtcaagaaacagaccattttacagctttattttattttttattttcttcatgctacctcgtataagagaaatagaccagtttcatcaccctgaaaagttcccttgtgcccccttgcagactctgcttccacctcacccctggtaacccctgataggctttctttttgtgtgtgtgactgggtctctgtctcccaggctggagtgtggtggtgcaacctctgctcactgcaacctccacctcctgggctcaagagatccttccacctcagcctcccaagtaggtgggacttacaggtgcgtgctaccacgcctggttaatttttttgtcttttttatagaaacagggtttccctgtgttgcccaggctggtctcgaactcctgagctcaagccatccgccggccttggcctcccaaagtgctgggattacgggcttgagccactgtgcccggatgacatgctatcaatgtaattttgccttttctagaattttctagaaatggaatcatatagtatgttgtcttttataactgacttcttttatttagcgtagagattggtatacattttctgtaaagactcagatggtaaatattttaggcttacaggcgggatggtctttgtaggatctacctactcagctctgctgttggtagtatgaaatgtgtactgaatgggtgtagctttgttccaataaaactttgactacaaaaatagggagagggccggatttggcccataagctagagtgtgccaatatctgatgcagcataattcactccggatttacttctattgttacatgtatcagcagtttattcttttttattgctgagtagtcttccattgtatggatgacgttttgtttattcatcgattgatggacatttgagttgttttgagcttttggcttttatgaataaagttgttatgaacattcatacacctatctttgttttcatttctcttaggtaaatccctaagagtagaattgctgtgtcatatgataaatatgtacttaatatttttaaaaatgtaccaaactgtttttcaaagtcttactatttatcagcaatgtgtgagaattctagttgttctaagtttttatcatcataatgagtgtgtactgaagtaaatacttattaatattcaaatgtcaatggatgtaaatgaatcattgaaaatgttgtgaatattgtccagtgtcactcatattttaatgtgaattttttacatgactcttattctcatagttttgccatatattattaaactattttctattctttaatcttaaggtttttataaaattttcctgagaacaatgtagacaccacctttgtagatggcagttaattcagtgttagacttactgataagggggcagagcgcaatttctctttacactttgcagttactgaaaaccacacaggccttactactcagttgggctgagtattgggttgaaatctttgaaatgtgagaagcctaatttaatctcacctctgaataggcagccactttagctcttcctgggtataccgaggactacccacaggcagattctggatttttctctaaaaagttatgcatctgttggacccctagagttttgtcttttaagtgtgtggctgagctaatttttacctggaaaaactttatgtagatgtttgaaatgtcgaccttggtgtttttttttttttttaaaatttcagttaagtttcataaactttcattttaagccgtgttacttcccagtgaactctcttgcacctaagtgaattgatttgctatttaggttctttgccataataagctcattaaatgctggggcctgttaccaaaaagtgattctttcagttttgagtacttgttctgaggctgtactctgacagagcaagatgtcaattaagattattccttgttagtggaaataaaatcaccttatctgcttataaaagaatctctctgttctttctctaaggggagggagagtatattcaactcacacaaagtttatccattcatgaagtgaaaaggtaaaagcttagaggtcatgaaaagatccccgttttaccagaacggaaattatgatccgagccaggggtatttttccgcagagctgactctcagaggtagtatcaagttgcagcttctatcacagcatcaaaaatggagtctctgtggagcttgaaaatctcaggccataactgattcctgtccacagactcaaagtcagaagcaagttcaccgtgtcgcagtcagtattacacaagtacaaagtgaaaaggtgtgaccgtgatcaataatggaaaagtgcataaagcctttttcttccctgtgaaccagcctggatttggctttcagagtcagggataatgtgccacgctcttactcggtgccgggcactgttctaagccttgtgcatattaaggtccaaggaagtttagggtaatggttcagaacactgccttcggatgggctagattgctgactagccaaataagtgaccagtttcctcagtgactccatctacccatgtttagggtggggattatgatagcgcctttgtcacggggctgttgtgaggactgaatgtgttaatctatgtacactctttaatagggtacctggcacagggtaagttatataggtgtgttggctattactgtcattttagtactcatcctaagaaattgttgacataggtactgtggtttgctccattttacagatgagtaaactgaggcacagagaggaattttcccaaagccacaaggctaggaggtagtgaaactaggattagaatacagacagtcagagtccaatcagtggttgttaactgctgtattctgctgccttcctgcttattaggagaaaatggctgtgcatttttagatgtaatctgcagtaaagcagatagtcctgcaaggaaggagtaggaaggctgtatttggcactgacggcttggactttaccactggttcctccagatgagtctctacacccattgccttgatacaggtcaacaaattggcagagagtccatcttctatttggagtagtcctatctcagtaaatgacatcaccacctattctgttatagaagccataatcctggttcgtcaatgactccagcttctccctgtttgtctattatcaattgttttgattttttaaatagcttataaatccatcaccttttctgtctccacgaccactccagcccaagtcactgccatcagtcactttcttaccaacctaccccgtcatccttgccccatgccagtctgttcttcatgtaggcaaaggtaaaatgcaaatctggtcagcttgtgcccgggcttaacacattacctgcttttacattccagtccaggtctgtctgcctccaaagcctgttctcttttttttccccatatttcctctataaagtttgtaggagtttcaaatcaaggccgagaaaagtaagatttgaaaggctgagaaaagtaagattttttaggtgtccagtggaatctggttttctttgacctttctcatcaaattcacacctcagataactaggccccagaatctgtacccattaccagacctgtcagcagaactcaagtgttccagatgggtttataatatctggtatttttctgggcaataagatgcaagatggccttctctaatttttttcacaattgccttcatcagtctagctagggatttgtgtgtctgtatttgtgtacttgtttttattgtcattagtttggttttggcacaatagagtccttgtcaaagtggatattattagcaggttgagtttcaagtttgctagaactgaatgcagatacaaagcatttgaaattatcagtatactgttaatggaggctagaggagaaatcaaagtaaattttcagaagtatgaaattagcaaactgccaacacagggttggaagtttctctattttcctcttaccagcttttaatctggtaatttcccagggagtacagacaggctgtggggaagctctctgcccatgctaacttgaggggaaaatgagcattaaaaaaacaattcattcagaatgccctgggataccagtgagcagatcagcaaccctaggatgtaatcaataatattggctttcagaatagaaccacagaccactttccccccaaatatgcaccacagactgccattcagcacctcagatcttatttatctatgcatttgagcaggaacaagtctttttgttcttaagcatggcccactggctccactgtcatcttgatgtttgtgtgaaaagctctcacagtatggccgtatggccatgctgatagcatgtaccctgactgtgttttatcttaaaccaaactgcagcaaacatgtgaggcagctcagataaaaactagaaggaagagattttatcataaaatccagggagttttggcagagcctcctaaagtgaaagagatgagaaggaaaaaatctataggtttgtttgtcttactagtgagggtaggtttgtggctaataactagagagataaaatatctacagcactgaaaatgggggaaatttgttttttaactgcatctttcctgagaaacattctgaggttctgctgtttagagccatgataagacaaccctaggaatgaagctgagtaatcattatgtcttagtctccactaaaaccacagcttctggggggcagctgggctgaggtctcgccagcaaagctcattaggccccaggtggattatgcctactatagcagggaagggtgtgatacctgtgttcaaccatcatatgggccactgttgacactcctgaaaccaaagacaggttagcaagcgaaaagcataacacatttatttaatataagttttatataacatgggagcctttagaaacgaagaccaaaagccccagaaatgaagacccaaagccccagaaacaaagacccaaagccccataactattcttatgtttaggcttgataaagaatggacagccatatagaactatgattggacaaagggtgtgacctaatggcagtatgactgaggaggaacctcagcaagggctgttggttcagattcttattggtctgtctgtgtagcatgtcttcctcctggatatagggcaggactcctctggaaagagggtctttggggagaaggaagaaggaagagagtgaccttcctaggtttcatggtttactttggtggagataggttctagtttctatgacccactttgtggaagaggatttttttatttatttattatgcttttattaagaaatgcttaaaggattttgtgaatttgtcttcctatccattgatcatttttcttttcttttttttttttaattatactttaagttctgggatacatgtgcagaatgtgcaggtttgttacacaggtatacacatgccatggtggtttgctgctcccatcaacctgtcatctatattaggtatttctcgtaattccatccctcccctatcacacgggccccggtgtgtgatgttcccctccctgtgtccatgtgttctcattgttcaactcccacttatgagtgagaacatggggtgtttggttttctgttcctgtgttagtttgctgagaataatggtttccagcttcatccatgtccctgtaaaggacatgaactcattctttggagaaataggaatgcttttacactgttggtgggagtgtaaattagttcaaccactgtggaagacagtatggtgattcgtcaaggatctggagccagaaatatcatttgacccagcgatcccattactgagtatatacccaaaggactataaatcaatctactataaagacacatgcacgtgtatgtttattgtagcactgttcacaataacaaagacttggtaccaacccaaatgcccatcaatgatagactagataaagaaaatgtggcacatagacaccatggaattttgttttttatgagttgcttcagtggggaaagagagatgggagaaaggagagcagtagaggtcagagagaccttggttctgagaccttccagtcttctttagttcagagtactcagcatgccaaagctccatactttggggtattgattgttttctaagccctaacactaccctctgtctagttgctgggaggatcagacagaaaaggacagatgtcactctgcaaggctggaagaacatacagttggtgaagatgtgcagtaatagtggggcagatccccctctgtgcagaagctcccctgtgagccttcttaaagcactcagccacctcataactcaagatgacatccatttctccttgcggagaaaggatttagaacaagttgagtcctggtcacctttgtgttctcagagaactttcctggaggactagacctgtggtcaggagggaaaatggttctcttattttccatcagggcatctgctcaggcaattctctgtgacttcctgcctttgcaaatgtaggtcaatccttccagaatcttaccctaactttcccccctccgatttctgtcaacacaatcgttcacctagaatcttttctatgccctcaaaacttcaaatctaaaaactccctgaacttaaagcaaagttattatttcctttctagtgccatagctctttgtccaattcggttatgatgcttacagcaaaaggaattctcatgcagtgtggcttctgtgtgtttcatgagactggactacagatgtgtttcctcagtttcatttatccagctaccccatgtctggcaaatgataatcccaggtcaggcactactctaattgctttatagatattttatcttcataataatcccatgagaaaggtacctctgtcattccagtttcacagatgaggatactgagggtcacatgttgtgtaatttgtccagagtcacagcgttttcaatgtgggtgaaccaggattaacacccaggccaacaactgaccccagagccctcataaaagtctgtgctcctctgggaataaggacgtcaggccgggagaaagagcctaatggtattccgtgagaggcggctatgcggcattgcattatgcatcagaatgactaattctgtgtacgagggttgtcaggtgaaacccagtggaggcacagcccagagttctgcaggggccttcgctggtaatctgatgcaatcaaatgttctaggggtggtagttagagctctgctgttgctggagagaggcccaagaaagaagtttcacatattgttttttgatcagcaggtttggaaactttgaatgtttggctcacaggatggtggaaatgctccagcacttcctgtggcttcgagtctggtttctgcgatagggaactgggctcgagccttgcctcctccactggggactgtctgcacacatcaccgagtgacaggcttgctgggaggaagggagcagccactggcattacaacagctgaaaaggaatttgaaaagcaaatatccagaaaaccagaacaagggaggaagtgtgtgcattagtttgcaaaatgatgaactttccagttgaaatgctgattcccaaagcgcaagagagcttggagtgaagggaagagagtgagtggctcagctcaggtctcatcttgtttttgaaagaatttttccaggaggaaaaggaatctggaataggccctcctctcacctctcagcagctccctttctatttctgtccagtgggaacaaatgaatagctgctgcttgaagaaatgccggaaggttttctgtgcaaggaattctggattttaaaaatgcatcactggcttgagtaatccttcacatttgtaattttaatctttgaatttggttttaaggaaagagtggttcatttattcattcacttgtctggaaaatattgagttgctctttaccatgctgtctgatcaggtctggaacaacagagatgagtaagatatgagtcctaccctcagagaactcatataaacaaataggataaggtgtggaaaagtgctctggtaggtcactgtaagcgcctaagaagacagattcagggcagttacttctagcacgggaggccgtgaggtcagggagatctttaagagaaactggtgcatgagattggcactgaaatctagatgggaatttttgaagcagacccaagggaaggaaaggacattggaggtagagagaacattctgaacaaagacagggtgaaagcgagaggtggagccgactgggcttctgggttgggtggggacttggagaacttttgtgtctcgctaaaggattgtaaatacaccaatcagcactctgtgtctagctaaaggtttgtaaacacgccagtcagcacaatgtcaaaacagacaaatgaacgctctgtaaaacggcccaatcagctctctgtaaaatgaaccaatcagcaggatgtgtgggtggggccagataagggaataaacgcaggtcacctgagccagtagcagcaacctgggtccccttccacgctgtggaatctttgtttttttttcactgctcgcaataaatcttgctgctgcttattatttgggtccgtgttacctttatgagctgtagcactcaccgcgaaggtttgcagcttcgctattcactcttgaagccagcgagaccacgaacccaccgggaggaagaaacaactccggacgcgccacctttaagagctgtaacactaacggtgaaagtctgcggtatcactcctgaagtcagggagaccacgaaccccccagaagaaactccggacgcatctgaacatctgaaggaacaaactctggacacaccatctttaagaactgaaacaccgcgacagttcgctgcttcattcttaaaggcagtgagaccgagaacgcaccaattctggacacaaaaggaccttagcaggctcaggaaatggcaagccatttatgaagagggaagagatagcaaacgttggtctcaagttctctagttctttacccagaccatagctggctgggggatgatcctgatttagtctggggggttcctttacgcattgccaccagcaggtgccgcaaatggaccattggcagtcttaaggtagaaccagttttccatgtcagacttacagagccattggatgtgcctggggtttggggagcagggactcgttgggtgggggaggatgcaccggtggtacctggatgcaggctgtgaaaagtttatatcctagaggtcccaagtcaccacagatttaaagcaggaagtgagatgttcaaatgatcacaaatacaagtattctgtttcttttactgttttatcttccgttgctttgcacagtagaagttgcagttaatagaagttttactgttctctgaattggaaagagttactcaaaagaattgggctactttcctggagacaagcccatagatgcaggtggtgataattcaatatgggactaacggaaagttttctctgccactttccattgcatttctggccaagactatttagcgattctttctgagaaaccgaggaggcaaatagtctcaaagtatgtcctatgagaaacgtgtgccgcaagatgtttcgttaaaaaaaaagttttctggacagatacatttgggaaatattatagattgcatatggacatttcacagaacacgtgttacgttaaagtccctgagaagtcctgcagtaaaggaaactttgaaaagaacggcgtagagcccagcacagtggctcatgcctgcaatcccagtactttgggaggctgcagcaagaagtatcctttgagctcaggagttcgagaccaggtaacataatgagacctcatctctattaaacaaaaaaatggcatagtggttacgaacatgagctatcaaatcagacatgtagatttcattctggctgggttccgtatgtggatgtgagactttgggcaagatatttaatgtctttacatcttggtttccttgtttataaaataggctagtaatggtaccttattcataaaattgtctctaaaagtatatagtaagtgaactagtaagttattagtggatattattctattcagttttttccaagaatcctgactctttatttttgcattgcatttataaataactcagagaagcggtgctgtgtgggaaatgctggagtgagactaactcttgcaatccatgcgtgacttctgatagcagtcccacagaggaaaggcaggccctaggtgctgagcgctacgtcacagatgtggacttgcagctatatgaagctctagaattggggagcaaaagaccatttcctcttgactgcaaggttagagtgtgtaacttcagtctgttttgccttccagtcatttaatgacaagtttggaactcagggcagtaaacagatatggttaggttgatatattaggagtttttcaattgtaagggacagaaacaactcaagctgatttagcgtaatgaggaatttattagtttgtctatctaggaaggatgttagggtagtacagagaactgaaggaaaagtgttaggaaactcaacagaaactgaacatagctaggccttctgtccttgttcccttttgaatgttttcctcttgacttgtctttgcttctccttgcctcattctttcctattgtggatgacctttccccatggagggagcatggctgcagacagcttcagcttcagcttcatccccagcagaaggcaagaactcctggtgatctacctgcctggtccctgcaaagtgctaggattacaggcgcaagccactgcgcccagctgacaaatttatgagatccttattaaggatatttatactaggttggatcacatttattgcaaattttttttcagattgttattcgtgtttaaattttttaaatactttaatatataaaaattacacatgggtcatgctaatcttctctgtattgttccagttttagtatatatgctgctgaagcgagcactgtctctaaatttttataaaggtttttggaattcagaagtttttaagcttgcttgtatcaaatcatcaggctcttctttgacgctttctgccttttgtgttttattagtttgctagggctgccataaaaaagtaccacagactggggtgcttaactaacagaaatgggttttctcactgttacggaggctagaagtcagagatcaaggtgttatcagtgttggttccttctgagggctttctccttggcttacagatggctgtcttctccctgtgttcttaggtggtctcccctctgtaccttctgtgttcagatttcctcctcttaaaaggataatagacaaacatgctgtattagggcccggcctgaagacctaattttaacttacttctttcgaggtcctgtctccaaatacagctacattctgagctactgggggttaggatttgaacatacaaattttgagggggacacaattcacctgtaacagttctcatactaaagaggcctctatcaacctgagaggatttaaggatttgaaggaagtcatttaaactagttaagatttagtatcttcattaatttactgcaaataataacacctgtcactcagggctgtgaagaagagtgagtaaagtgcgtgtccacggtgcccagccccatgcctgctctaggcgcctgtctgccactccttctggcagctgtcccctagccttcatgatgtcaatgccagacactgggaaagcaaagacttttctctgcaagtttccattatattgcaagccaaccgtagctaatagcacatttccccacctgtcaagtaaatgggctgaattgttgctgagattagcatacatggctagcgtgtacagaaaatgaaatactgagcctccacactggattccattctctgtttattctctttctgctgagtgcttgcatgttctgttctgaacacaccgtgttccctcatttctgaagccacaaacttcctcttaggccccgggctgtcttcagaatggccatcaggtccctgatacgggaacctgaaatgacacccccaccatatacccatccatccagaccctccagtgtagggcaggtggggggacatgtgcccaccactgctgctcccatgggaaacaaagactggcttcagcaaacctggacactcatacatcctgaataatgtcagctgaccacaccaccgacttcatgtattccttgacctagacactaaaggtattgagacaatttcagtctgtttggcataagaaggatggtagcacaaagaagagaagagcaaaacttttacccaaagcctatttcggtggccccttctgaggttcagtgtaccatgcagggcggtgttctcaaaagtgaagactaggccaggtgtggtggctcacgcctataatcccagcacttggggaggccgaggtgggcagatcacctgaggtcaggagttcgagaccagcctggccaacatggtgaaaccccatctctactaaaaatacaaaaattagccacgcaaggtggtgcctgcttgtaatcccaactactcgggaggctgaggcaggagaatcacttgaacccggggggcggaggttacagtgagctgagattgtgccactgcactccagcctgggtgacagagtgagacttcatctcaaaaaaagaaaaagaaaaaaaaagtgaagactagagggctccaggaagacagcagtgccaagagggaagggctgctttcagtgggtgatcctcctgaagccctttccctttctgcctaacctaatgcaaggggaaaatgtggtctatgtctttttctatcagagacaactcaacattaaaaatatgagatgaacagctccctttccactatccccatcatcattataaacccattatccatcatcagtagataatgacttagcgggacagaggacagcttttctggtgaggaaggaaggggctgaggagtggaagcagatcgtttctccagctgtttggtgtttctctcccattgatctgccctggcctccactggcccatctgttgggcttgtgagtgcagtaggggaggggacacacggttcaccagggcaagtgtgttcgtttccccaacacacagcttctacaggaatggccatacaggcttaatttttttctcagtagggtttactgtgcaacagaaagactacaaagagcattaaaaggttcaaagccattgcagtcacccaaaactaaaaaactatatgggaaattcagaaaaaacaacaaaaagtgatcaggtatttgggacctttgtggaaccgaaagaattaattaagctgtatggaaaaacctgtagagatgtaacagatctttaagagactacagcaagaggcatgttgaacttggggcatagaacaatgtgtagagagatgagtttctaggtgggagtcaaagcgatttctgtctgtcgtcttcaaaatgccacccaacctacggagacatttagtggaagagtgggcttgttcacgggttatagagtcagatgttactgctatacagacttcagtacctaactctagaagaagtgattcctctttatttaatccactcaactataaacacaccacttaacatgcatatcgaggtgatagaatcttaatattaaacatggaacaattcccatatttttggaatggaataaagtcaagccagcaggcaagcaggaacggtatagcattctctgcccattctttacccaccacctgggatttgatagtgactttggaaggcatgatgattagaatgtctagccacctgcctagacttcccttttgtttctccctttaatggttcttaaattttagtttgtataagaattattgtacccggctgtctacacaacttcttgtagctggtattttactgggcaatttaagtaatactaggttatctactttggtaattttgataacactaggctcagtactgctggtagctctaatgagatgttcattgaggaggggatgcattcatacaacagctatgtattaaaatgcctgcctgccgcggccctgagtctgtaactgtgaatgcgatgtggaccttgcccttagagtactccagatgtagtggggagaagttgacaaagggagtctagtaaccccagagttatgctgggggaagcataggacaccaggatgctgactttgttggctgaagattttagaatgtatttccttctcagttatgcctcaccaagaggagttgggcttgtgtgctgatctttcctggagagcctgatgagaccatgtgccttgtgtccagttcaaggatgggataggttgccctgatcatcggtaatctgcctagaggatttgctagcttaccgcctgtattagtccgtttgcatgctgctaataaagacatacgggagattgggtaatttataaaggaaaaaaagggtttacatggactcagtttcatgtggatgggaggcctcaccatcatggcagaaggctcttacatggcggcagacaggagagaatgagaaccaagtgagagggtgttccccttataaagccatcagatctcttgaggcttattcattataagaataagaataagaataagaataccataagaatagtaccgtaagaatagtatgggggaaaacttcccctgtaattcagttatctcccaccgggtcccttctacaacatgtgaaaatttgtcgagactgaggggaagggactgttgacctctagagggtggaggccaggtatgctgccagtcatcctgcaatgctcggggcagctcctacagcaaagaagtatggccccagctgctaattgtgccaggaatgagaaagcccaggctagaacctttcttccctaaatttcatcagaagtaacagtgattatatatagaagccttaagtgctgttttcttgtgaaaacataaatttaagaggataaagtctggacttctgaggataaaacatgaactagattatccattctgcaattgtgcacctggctgtatcccagaggagccttgctatgcccccctccctttctctcgtggtttgttaatgttggggaaaactgatgaggtctaattgggcttggttaagtgaattcccaaggggaagcctccttgctcctttgctctctcaatggctgctttgtgtacagctcccctctgactctccactggagccacgttattgtattctcacctgttcaacaggttttccctgaacggtctgagaaataaataccagttaaaggggtagaaaaacaagcttggcctttgattcctagaaggttagatgaccttttttgctgtaattctagacaattttatgtagaggtgggggcaaggtacttaaaatgcattttaatttttattatttactgtcttaacccccacgattgtgtatgctttcttttgaatagtgttacctaaaattcacacaatctgtttgcacattagagcctgctttcttaattcttatgctaggatatgtaattgaacttggatgtcgaactgaagtaatgtagcacagataaaacgcattgttcttagagctctcaagtattcaaagagcatacagactatggagaggaagtccgaagtacagattgtttgcttgcatttgcacaaagaagacactataattacttaacaagtccctattgttggatattcaattgttttcaagttttgagaattataaacaaattggcattgctatggttaataattatttcttgaggataacatcctagaaaattaaaattactcaaagaggatgcgaaattttaaggcttttcgtatagtttgccaaaggccctctggaaagctgtgctgatttacactctgaataggtgtgcagggacacacagcttccttctttagaagtcacaaaccaagaggtgtggtggaagtgtccagggggtcaggagttctctgaacacattcacttactgttcttgcacttacttggcttcagcaagtcacctgtttcaggaacataacaggcatgctcctgccttggggccttcgcacttgctgattttttggcctagaacctgatttctccagacgtccacaggggccccatcctcacctctcagatgtctttttttttttttttttttagatggagtcttgctctgttgcccaggctggagtgcagtggcatgatctcggctcactgcaagctctgcctcctgggttcacgccattttcctgtctcagcctcccgagtagctgggactacaggcacccaccaccacgcccggctaattttttgtatttttagtagagatggggtttcacggcgttagccaggatggtctcgatctcctgaccttgtgatctgcctgcctcggcctcccaaagtgctgggattacaggtgtgagccaccacacccggcttgagacagagtctcgctctgttgcccacgctggtgtgcagtggtgcgatcttggtcccctgcaacctccacctcccgggttcaaatgattctcttgtcacagcctcccgagtagctgcgattacaagcaccaccacgccaggctaatttttgtattttttagtagagatgaggtttcaccatgttggccaggctggtcttgaactcctggcctcaagtgatccacccgcctcagtctcaaagtgttgggattacaggcgtgagccaccgcacctggcctcagatgtctttactcaggtgctgccttctcggtgaacctttctctgagtttcctgtttaaaattgtattcctgcccctcccacactggtagaggcacaggcttcagtttccttcgctgcttgatttttcttcatatcctttgttgctatatcccagatttgctgctgtatatcctcagcatggggaatagacctggcactgagcagaggctcaataattatttgttgaatgagtgactaaaccactgctttgtagatttgctcttgctagttaccactgattagcttctcagcaggcttccctaatcatctttggccaaaggagtagcggttttgttttggttcatttcctttacttgtcagctgcgctgaagttagttatttatataactgctggtgttgttgaggcttccattattaactctgctatctctattgtctcagtaatgtccagctactgctgagatctgggatagtaactcacaaggcctactctggtctggtaaaggaccaaatgcacatgtttaagatcttcgttacagatatcaatttctcaaaaaagacaagagaacccaatagaaaagggacaaatgtttggactgttcacaaaaagggagcgtgtgtcttttcctctttatgttcagcctcactcacaataagagaaatataattttaaaatacattaagattttatttttcaacctgtcaggtttgcaaaaattcattctgttggtgaggctgggtgtaaatagacaacctcatacaagtccaatggagagaaatttggaaatggctatcaatattaactgcacctatgttttgacccagcagtttcagttctgtgaatctattgtaaggatgtacttgcatatgtgcaaaatcagttatatataagtttatggatcacagtttggtttatgatagctaaacttaagaaatcacccaaatggcccacagcaggggactggttcatcaaataggacacatccacacaatgaactactatgtagctgtgaaaagaatcaagatgctctctttgtactaacatagaaggatttagaaaatatactaaaagaaacaaaaagaatgctcccttttggccagtcacggtggctcacgcctgcaatcccagcacttcaggaggccggggagggcagatcacctgaggtcaggagttcaagaccagcctggccaacatggcgaaaccctgtctctactaaaaatacaaaagttagccggatgtggtggtgtgcgtctgtaatcccagctactcgggaagctgagacgggagaatcgcttgaacccgggaggtggaggttgccttgagctgagatcatgcccctgcactccagcctgggcaacagagggagactctgtctcaaaaaaaaaaaaaaaatgctgccttttatataaagaaagtggcaaatgtaataatgtatttttgtatttgccttctatacttgaagaaagtttggagggatacctaatgactttggataactggaagtataagaagtgaacgcagatattgggcaggtgggtgacactgggagaagagactctacactgtccgtctttgtacacacaaacacacatacacacacaagtttgtatcacatgattgttaacaaaaaattaattttaaaaagaaatggggctgggccaggtggctcacgcctgtaatcgcagcactttgggaggctgaggtgggcagattacccagagttcaagaccagcctggccaacatggcgaaaccttgtctctactaaacatataaaaattagccaggcgtggtggtgggcccctgttatcctggctacttgggaggctgaggcaggagaattgcttggactcaagaggtggaggttgcagtgagccaaaattgcgccactgggcaacagaaccaggctctgcctcaaaaaaaaaaaaaaaaaaaaaaaagaaatgggctagcctgggaagaggcagcagaggataatggttacctcctttgtgtaagaagcacgattcattcaagtgagaattcaaagtctgttctgaatgccattcagtccacatctgtacattttctgccccacccccaccccccaccgaaggtgcattgtgtgaaccgaccttggggagggagtatgggtgtgcatgtgtgtgagctctcagggtgtttctccttcttcatgatatcctggttgctatagtgtggagatctgtttgtgacacacagaaaacactttaaagaaacactgcttcctgaccatgacttcctgggcaatctgtccttcctcagactgttgagtgccagacgtttatatgcatgtctggacagagagtgagcctggctcattcagaccctgggcaccattcagagcagaactcagtggtaaggaacagctttctttccactgaagattcgcgcaagccgtgccccacagggcagcgtctcctggcggctttgactcaagggcgttggcacgggcacccccatctttcttctttcctcaggagcccattgtaccgttggctgtgcccctgcaccttcagcacccaggcaccaaggggagccgtttttcataccaaaccaccagtgaaaacaggaagtgatgaagcaaaattcaccctgcatctgcactgagtgacttctctttctttttctgtcattcctcattaggtatagacacgtgtggccgtttacgctgtaggatcctcattcccactggctttgaacattttggggacttacaatgccgccacccgcggacatcgtcaaggtggccatagaatggccgggcgcctaccccaaactcatggaaattgatcaggttagtaacgtgacagcattgggtgtctattttcagtttcctttctatactggaattttcatagactttggatagctcactcttctccctttctctctctagctgtgttgaaaaatctgtgcaataatagttgcaatgtgcttgatttctgtagcacatacagtgatggatggggtttttatactcttccagcatccacttggattgtgtcaatacaggatttgtgtctgaagctaggaaggaggtgggagggacaagtggatcgggccctgggcagttgacacagtggaggctgccccatccctgccttgccatgacacatggatatgtgcagattgttggaacacaggcaagacaaaacttaatttttaaaatcccttttttttcattttttgcagaagcagccaaatgcattggtactttgttatattaatagctttgtaatgaaattagtatagaggggttcagtcttggatttcagccaattgtaatttttatttttagtgtaaaattcacaatgtgtctagcatattgtctgccatgtagtaaatactcaacaaatgtttattgaattaaaaaatatcaagaagacttataaaagtggcttgacccataaaggcatcctttaacttgaatcttgagaattgtatggtgtgattctcatgcactatttgattataggttatctcagaatggttacttttgtcctcactttactgtagtcactctagagcaaatgatttaaggaataaaaggttgagacctattatatacttacaggtttcataatgtatatagtatagggttctagatggctttctacattttcaaaattacaataaccatggcaactccaatctttatgttctccatactattttacaattatgatttacaattttttttcctggtcagattttattatctggtggcagatcaatgcgagagttatatggaattgtgcgaatccaaaggaatcattaaaatgaattatacgggtcagctcagaattaattgaacttaaactcaaatgtaagaaagggtaaatttttgggatttttgtcaaaaaagctgttatcagaccacacatcattgtcattttaactgctctctgaggtagttttctactgactcaagaaggaacctatacaaacagagaaaagtagagatgcctaatagtttcggatatatttgagtcaggcaacagatgcttatctgctttcatatgtggtttgagatgctagttaaaatttaccttaagaaaatgtttggagatactcggtgcagactaaatgtagtttggattaggtttggccacagcctaagagaccagtggcttcagtgagatggaagttggtctcacacacgtgtagagaggtcctgaatgccccgcagtggcatgcactggggccctctgtcttgttgcattgcccttctcaatctgtggagctttggaccacatgcttgggcatcacccgaaagcacattagaaatgcagaatctctggtcttattccagacctcctgacccaagtctgcattttaacaagatctccagggtatccctgtgtgtagttcaatctgagacgtgctgagctggatacctggtgcccaagcccgagtactaatcagaattacccaggcacttattcgaaataactattttcagtggtcccatcccaagagactctaatttagtggttctggtaaactatttaattttgattctgccatggtcagtgcagtttgggaacctctgctttaagacagcagctcttgatagacagtcctcctccttacctgtgaggttagtgtagtgttctctgcctttggagatggcctttgctatgtgtgtgttttaatatatatatttttaaattatctgcttattttggaataattttagatttacagaaaattacaaagattgtatatgcttacatttataccctatttccagtttccccttatgttaatatcttaatcttggtacattagtcaaaactaagaaattgacattggtacatcacattaacataactaccaactttatttggatttcaccggattttccactaatgtccttattctgttcgaggatccaatccagggatacgaattgtcacgtttcctcagtctccttccgttttggacaatttctcagtctttccttgtttttcatggcctgatagctttgacaagtaattttatgttgatacaattttaaacacacaaaaattgccaggatagtacaaagaactctgtacctactttttctgaaccatttgatggagccctggaagcaccatcccccttcacccctgaacactcagtgtgtatgtccctaagattgtagccattctcttacataataatcacagtacatttataaaaccagaaataaattgaatactggtataatgctatcgtcaaattcacagttcgtaatccatattcaaattccatcagttgtcccaataagatcctctatagctattttctctctggtgtaatatcctgtccaggatcatgtactatgtttattgtcaggtctctttgatctccattgatctttagaaatttctcagtctttatcttttgtgaccttgacatttttgtagagtacaggacagctattttaggaaaagtcttcagtttggggttctctcacatatcctgctgatcagattcgagttttgtatttttggcagaaatgtagagaaatgatgtgtcctttttggctcatcatatcaagaggtacatggtgttgcattgcctaattcttgataattattctggttttacagatgacaagtgtaaacagttggttaaattataggcctcctattaatcacatatggaaacctagacgggcaattaggaacccagttcctaattgccctgcagttgctggaattacaatgagacttatggaagtgttgctgtcagatgttgtttcttgattgaatcagaagttggcacaagaattagaagtatgttttcacatgcaatgaagagtagaagaaatgattattacttgggttttctcctaatcttctaccttgttcagtaaagatcacataacctgcctctctcccatagcatgttagcttcatttagaaagctctttgcttctttttagcctggatagctgctatttcactaaaagccgtttccaaaagttgggttaagcactgctgctctattgtctcccaaaattttgggtgcccctccacttatcacattgtattgtccttgtctatcaactgaacccagtggtcctcaaccttgactgtgtacaagaagcatccagggagcttgtacaaaatgcatataccagcttgtgcaaaatgcagccccagctgcagagattgtgattctgctggccaggggcagggcttttcatctgcatctgtgataagcaccagatgaatctaatccaagggcttccacagtttgagaagcagtcattagactgggaactgcctgtctttgagtgttgtttctccttgcctggtgaacagtccttaaaatgaaaagatatttcatgaatgaataactgggaggcggtgcttcctgagtagtgattatcttatcaggtgctcaattctgctcagccaccctccatcagtgcctggagttttcagagggacgtctgcccatgatggacttgtttatcttctttctaaatatttaggagaaaattctgtgtttccactcagcaggaaaaatccccaggagcttcttagacatggactttgctgtatcacaggaaggtctcaaaagaattatcaactcactggttcctgactcctgctctcgccttcacaatgtattgttgagtttcaagcccggggagccgcttgaggatgaggatgcttgttgtctggatatatcaaggctcctgcatgcactgttcttgttaacctattatgtcctgaataatgtatttgtttctcggtcaagagtctggaatcccaaacacttcaataagcagcatctagtaagaggcagtgggctccaaggacatttaaacctggatgtgagcacttgttttagttccttcagctgctataacaaagtaccttaaactgggaaatttatgaacaacagaaatttattgttcacagttctggaggctgggaagtccaagatcaaggcaccagtggatgtggtgtgtgatgagggcttgttcctcataaatggtgccttgtatgtttccccacaggcaaaaggggcaaacaggctctgtcaagcatgtttttataccaccaccatgggggccaggtttcaaacagatgaattttggggagacacaaacattcagaccatagcagtcctggagccctgctttctgtgaaaggctcagttagccttgagcctcagtttctttgggataataatttgctactttgatggtccttgtgaagattaaagaaatcatgtgaaaagagtgtagcatgttgcatagcttagagtgattcctcaataaaagcagccattattagctagattagaaaattaggtactctggttttccttttcacctgcacttccattgtgaacatttgccctctgttctcattctttctctgcctaactttttcaatgtttaggaaggagaaaaaattaaaagacaagtgggaggcatcctctggtaataaagaggtgtcctaattggacacatagccaatttgtgctatggaatattcactggctccctagtactctgtgattttttttttccatcttggccactcaccatttctgagcagcagcttttctgttccctgcataaactcttcaagcctccagtatttcttgtctctgccctgccccctcaggccttgcttttcaaggaagacacagaccagaaagctaccacttctgtctttgcctagaacttctcggcctacatatttgcatggcatcacagactacctgatgcctttatctcctgccttcctgttttgttttgctttttctactgctagcagagaagggaagaggtggtcccaatttgtttccagtgctttcagcttatcccaacccccaatgctccacataggtgtttttttttttttttttttatactttaagttttagggtacatgtgcacaacgtgcgggttagttacatatgtatacatgtgccttgttagtgtgctgcacccattaactcgtcatttaacattaggtatatcgcctaatgctatccctccccccttcccttaccccacaagaggccccggtgtgtgatgttccccttcctgtgtccatgtgttctcattgttcaattcccacctatgagtgagaacatgcagtgtttggttttctgtccctgcgatagtttgctgagaatggatccaaaggacatgaactcatcattttttatggctgcatagtattccatggtgtatatgtgccacattttcttaatccagtctatcattgttggacatttggcttggttccaagtctttgctattgtgaatagtgccgcaataaacatacgtgtgcatgtgtctttaaagcagcatgatttataatcctctgggtatatacccagtaatgagattgcggggtcaaatgatattagcccatcctttctaccctacctggggctttgtcccagccatgttctcttctcttattcttttcttcttctctgtcttcaacagtgaactcttctgttttcaccttggaaaatcctccccttgacctagtaactctcttttggtagtattttattctgtttttccattccaggcttatttaaatgttaccagtatatgccatctatgttgttccatgcttattttaatatttgcatgaacaacaatttacctctctacagggctcccctttttggtggcacctctgccttggttgtcctcaccctctcggttacgctcggcaaagctgcccattctcatcttcttgaaactctcccttccttcctctagcttcagtgcctgagattcttcctccctgtttgattcatctgggattgtttccttcctggttcctcttctttctagatcagttccaacctcagtgctaagccctctggtctgtgtgttcactgtcgacactctttgtcttagagtccatgttcgctcatgacgttaaagtttcacctctgcctacatacataacaacagttcccatcaccggcatagcctgccagctaaccactagtttcatttctctgttgggtggatatatggttcccctctctaacttcagttgtctacagacgagacaaatggttagtgaaactgcccatatgttaacctgaagaaaggagtctcacaggtattaccaactttttgaggttatatcatgtagaggggggaccattagatatgttctttttttttttccttgacgcagggtctcactgtgtcacccaggctggagtacaaaggctcaatcaaagctcactgcaacctctaattctgggctcaagatatcctcctgcctcagcctctcgagtagctgagattacaggtgtgcaccaccatgaccagctagtctttgtatttttagtagtgatggggttttgccatgttgcccaggctggtctcaaactcctggacttaagcgatcctcccacctcagcctcccaaagtgctgggattacagtccatgaaccaccacagtgccctgcctagatgcgttctttatggcccaagtgtaggaactccatcctatttgtgctaggagacacatttcaccttcacccaagaaaagccagcacgggccatctcatcaggcgaggggatccatcatctctaccaagtgtgcatcagacaaatgcttggagaagatgttctgagcatattcaggcccaaaaagggcaatgggaagagatacatagttttcaaccttagttctgcttctcaaatggcttggggcagaggggtggctgccgagggcttccgggcacccctcgctcactcctgctgcagcacctttgtattgtcccattttcatttgcgtatgatttggggaaagattttgtttgaaaaaagtttatcagtttaaaaaaatagacatggatgattcttgagctttctggtattcctgagacttcagtcagattctttagggtggctttgcatccttccatatttttcataagcattgtccctgggccaaggtagtgtctgcaggcactgtatgtgattcccaggtacccctctgttttatagaagctgctcctttagacgcttgttcccgcacattcatggtcttttttcatctcttgccgtttccttctaaaagtatgccaccttgaatgccccctgccttctcccagctctctactgctttaaatcctggctttgctaagcactgcagagagcctcctttgtactcaaaccttttctgatcgcattataatgcagtcttttctccagttttctaatttcttatatcattttctttgcctgtagcttttatttgcagttaatatatttcacacgtaacgtaatttacatttttcttttttcatgctcacttctcttgaaatagattataagctcttggaggtcagccagtggcttacatacatttgtatcctttggttcatcacattgatctccgttactgtgtgtgtacaataggtttcaattctgaacagtgaagataagaataaaacactggtggtcttcattctccaaacagaaaaattataatagcacgcctaccccagtatattgggaagggtttaattccctaaaagaaacacagatgcatgtgttttaggtaagtgtgattgcctgcagtttttcaactaccatatttctatagcatatttaagatataattccatatgcataaatttgatttacacaagacctttgaaaagctcattgagtaaaacccatttgagtttttgtacttgacatggaattttgctcgttagtagcagtaataataacagcaagcaccacacactatgtggcaggcaatagaaggccttgcacgtgggatttcatcaccttactacagccttcaagatcggcttaggctccctacttcatagttattcaaaggttcattaacttgcccaagattactcagctaggaaggtactgatttgaatccagcactgtataacaccaaaacccaggcagttttttggtttttttcttgttgttgagatggagttttgctcttgttgccccggctggagtgcgatggtgcaatcctggctcactgcaacctccgtctcccaggttcaagcgattctcctgcctcagcttcccgagtagctgggattacaggtgcccgccaccatgcctggctaatttttgtatttttagtagagacagggtttcatcatgttggccaggcttagacattgccaaatgtctcttgggcggtggacagagtctcctcctgttgagaatggactaggtcaggggctcctgagcttgcttctgtatcagaatcactcatgaaacatgttgaaaatacacagaggatcattgtgtagtgattcaaggttcagggatccttgtttttatgaagctcccctggtgatgctcatgctgttggacctacatttgaaaacattgttgtgaagcccttgaaatttatcactctccctgcaggagctacctttggctcccacggtaacttttagtgagtcctttaaagatagtgcctcaatttatccatgagggaaatggtcctaaaaattcttagcctctcctttacagagagtacaaacatagttttaagagctcattttgctccaattaagaaagctgtaataaagactgtgatactgcaccattgctttcataccgtcataataggtgaaatgacattggtagaggaatagacatccttcatctgatttttgcaacttttagatttggtaatgtaacagatatttcttaaacttcctttaaaatgaagtgactggggtacttacttttctggttttagctctcttttcttgtgtgagagagtctatataacctcataaaatcttaaaaatttgccaagtttttgaagaaaaacacagcaaacatatctctccctttaactgagctgagtttaattgagcgagaatgaactctggcattctccttttccttcagcaaatgaaatgcagatttttagtttgctctgtaggtgggtgctggtgggattctcttctgttctacttccttccacaacactgccactctgagaagttcgggcaactcaggacactcttgtattaactatgttttcttaagacttgatgactaagacctctgacatttctagaaccttttgtgaatgttacactttgtgcttattttcctgttaggtcaacaggttaattgtggcaggatatctaaatatgtggatttcagtgttgagaaggaactctgggtacccaggaacaaacagcttgtactttaggagtatatagaccaatgtgcagtgtgtccagaactccaaggaaatgagagcagcctctagcaaataaaatatgtgcttttctagtttcttgttcctagctttccatcaaatgcattcatgggtcaatggcatcaccatcatgcttaacccccatccccacaatctccatagcccctcaaatagcaagtcctgtaaaatcagcctcctaagtgggcttgagtccatccaccctttttccgtcctagccgccactgctgtagcttatttcccctaggtggcttcagtagcataacagctggctgccaggccacgcttcttccttcccctccaatccattcccctaggcctaacattctgcactggcttccattgcactagaatagaatccagacgtccttgctgtgttggcagggccccctgcccccagctcttgccagtgcactgccttgcttagtgccactctggagttccccaacgccaccatctgagttctcatcatatgcaaacattttctcctttcacaaacacaaatttcttcctacttccaagtctttaaaaatgtgattttctcttaactagaaattatcctcctcagttctctgcatgtctaacacctgtttattcttccatcccagatgaagtgtaagttccttagacctttctctaaggccttttctgactcttcagaccggatgagggtgcttgctgtgtagaacttgtaacatcccacagggctccacttgtcagcattgtaatcactacgtgatgctctgcatgggccaagtatgtccccagcgccagcatagggcctgcacgtggtaaactcataaggagtgttgagtaaaggaaataagtgatatttatactttttctgtctattgatacagacaataatacatgaacaggaatgactatggtgaaggcattctttgccttgtttgcaccatgtattctaaatacattattacattttataaattggctttaggaaaatctttgtgtgtctttccatcaaagccatctgtagttaaaagacaatcagtgactttgagacaaaccagctcaaaatgatgatggatgaatccttactctgggacaaactcgtggcgatctgtttggattgatcagcctcatcatcatgagatgctcataatttccggctgtcatttcttcgttgaccaccctgacctgtataaacaaccatccatctgcctgtctgccttgcttatctacatggctcttgtacctcaaactcagcatattcaaacggtccttgttgttcctcccacctcaaacccatacagttttgcttttcttcacgttttccttttcttggtgacagatgtgaactacacccagtttgctcaagctgacaccatgttgtgtcttttagactctttttttctccctcatctttttatccaatcagtcatcacagaaaactgtctgcatctggtctcggtcacatctgctgctgccaccctctctggacctcttccttctggtcagtgtggaggagtacacagagcaggagagagcttaaacatcggtgtgtgttgagtatcctcaaagcacttcaaaagagagagcataatatctacacaaacaggagattatgaggacaaagcaaatgggtataaattgtgaacaggtgtatgtgagaaagagccaattagacatcttataagtgaaaaatgcagtagtcactgggcgtggtggctcacacctgtaatttcagccctttgggaggctgaggcgggcggatcatgaggtcaggagatcgagaccatcctggctaacacagtgaaaccctgtctctactaaaattccaaaaaaaaaaaaaaaaaaaaaagccaggcgtggcggctggcgcctgtagtcccagctactcgggaggctgaggcaggagaatggtgtgaacccgggaggcagagcttgcagtgagccgagattgcaccactgcactccaacttgggcgacagagcgagactgtgtctccaaaaaaaaaaagaaaaatgcagtagtttttcccttatctgtgggtttgctttccccaaccaactacagtctgaaaatgttaaatggaaaattccagaagtaaacactcataagttttaaattgtgcactgttcagtgtactgtgataaaatcttgcattatcctgctttgtccctccaggacttgcagcacccctttgtccagcatatgcacgctatagacacttcccatttgttagtcacttagtagccatttccgttatcagatcaactatcatggtatggcagcacttgtgtccatatggcccttattttacttaataatggcttcaaaatgtaagactagtgatgctggcatttcagatatacccaagagaagcttcctttaagtgaaaaggtgaagggtctagatttactagggaaggaaaaaaaatagttgctaagatctatggtaagaatgaatcttctttctgtgaaattgtgaggaagaaaaataattcatgctcgttttgctctcaaacctcaaagtgcaaaagttagggccacagtgtatgagaaatgcttagttaagaccaaagaggcataaaatttgggggtggaagatatgaagagaaacatattctgattgatggcagtcaggttcagtactatctgaggtttcagacatccactggaggtcttggaacatatgcccctcaaataaaggagggactactgtatatgttaataaaatgaaaaaaaagaaacaaaacaaaaaccaacagcagaaagataaaacaataaaacacagagtaactctagagtggatttggctaaagagagaattggttaattgaaggttgaaaacaaggaattcattcagaacatggctcaaaagagaagggaatgaaaaatattaatacaaatgctaagctgtgttgaaaaggataaattaagaagctataatctatgtctaattggcagttccactaataaggaaatgaatgttggagacaaaatatgtaaagagcttctggctaatgtcatgcttctctggaattaaagggaaatctgacagtgagaaagaacaggggctctggatttggccacttggatctgtgaggctctcccatcagaagccatgtggactttaataccgtgtccaagggagtagaaaatggaagatttctaagcaggggagtgacgtggttagttgtacttttagaaggtgccaattggagaattgttttttgagggcaaaatggaaaatgagaggctagattgctcttgcagtagcccaatcaagaaacaactatgccatgaactgggacagtgatagggagacacaaagaagttaggtatgtgtccccgttgtgacatatgggaagactaatttgacagaaaattgatgattgattatgtgtgtggggtaaggcagagtaaagtgctaagggtagttctgagatttctggtatgaacaactggaaggatcttggtgacacctgccaagatagaaaacatctgtagaggactgtttaggtggacttgcattcctcatggacaccttacagaggggtacaggcaattgttcaggtgtcagcatatctcctttcatatttccttcgggttttgatacactggccagttttcccatttaacttctctcaaccccagtgcaatcccctgtcatttgagattgcacacctgattatgctgctcccctgtctaaaaacccacatgggtccaaacctttaagagttgtcatagttcagactcactaaaagagagaattgtaaatattctcaccacaaagaaatgataaatatttgagatgatgggtatgctaattactctgatttgatcattccacaatgtacacatgtatcaaaatatcactttataccccataaatatgcagttattgtttgtcaattataactaaaataaaactaaaagagttgtctataggaattaggcattttttcctctatcttgccttttgagccactgtctcatctttcatttgtgtgacattatcagctcctccatatgcaaagagggtcatccattttgctctgcctttgcatttgctgtatcttcaacccaaaatgccttcggaaatccagatagcactgacttgtgcttgctcccctgtacccacaggcagaataaagaggacagctttgagagtcactccggactgcattggcaggacaggaaacaaacaacaatatgaaggagagagggaagatgtagtgttgattccaagtttatattctgacaaactagaagaagatgaataaaagttgaaaactgggaaagagagttttggggtaagatttgagtttgaggttatgaaaggatatgcattcaggttgaaatggtctgagacagaaaggactacagagaagttggggttggagatggtgatttgggcatccagagtgagcttgagcagagaggctctcctggttggtatcaaacgttccagtgttaatttaggattttataatttatgcatgaggaaggatcatctactattcatatggtgatgctaaaacattgcacttcaaataagatttctcctgaacttcctatgtgccaggaaccaaggcacccagctccagaacccactccacaggtgttagcgctgagcacctgggcttgtcgttcatggttttgaggacttggtagatttgagatggagttaaagggtaaggattgtggaattgtacaggtctgtgttcaaattctgactctcttccatgtgctgtgaggctttgagcaagttacacagcatctttttttttttttttttttttttttgtggcagggtctccctatgttgcccagagctggagtgcagtggcatgatcctggctcactacagccttgaccttctgggttcaagtgatcctctcacttcagcctcccaagtagctgggaccacaggcatgcaccactatactcggctaactttttgtattttttgtagtgatgaggttttgccatgtggccaggctggtctcgaactcttgagctcaagtgatctgcgcacctaggcctcccaaagtgttgggattacaggcatgagccactgtgcctggccaaattacgtaacgttttaagaatccctcatatggtttgctcattagtgaaatacacttagtaatatcatctggtagggagtatatggtagtcactcaaaaaacagtagctgttgctacactgtatcataattagaaaggctggccaagtgatgacagtaaaagaagacagtaaagtctgggttgatgatatattgaaggtaggggtgaagaatgtgagattgtcattattgtttgcatagtttagacccttcctgaaaatcctgtgttactattcttcagggctgtaggttctgcctgaggttgccaccattaacttaatgggacattttttgagactcagaagccacgtccctccactacctgctggcagatgtctcatcatgtccattgccactcaagaaaggaggatgaattgccattagtacatccactcaaaagcacgcagaccaactagtagcaaagagagacaagaagtacaagaaaaaaataaaaaaactaaatgagaaacatgaactaatttcatacttttttggtcacttgttcctttcagtgttcttttgactgctgtcttactttcaatctcaggttccttgccattgataaaccttcatagtcctgtgtggaaattgagcctgaaccctactttgccttcagggcttattggctttctcatatctactctcctagcctgataacatcctatccattggagctgacagtcatttctgtttatcctattgaatctgtctgaatttttatttttaagctatgcacataaatacagttaattttacaaaggtgaacttgacacacataaatgaattatttcacatgggtgaaggtaagcagaccataaggcctgaattgattctccctgtgaatcattcatttccacatgaaaggaaacacttgattacaaaggcatggtggagtgcagtggccttctgtgcgtctagagtcatctggaagtacttggaaaagactgatatcaaggaagtttgaagacaatatgggaattaggaaagtggttgttgttgctgtcagatataaggaaattggggaaaaacgttgttcttgatatccatagcaacattgatatgtaacaatattcactaaaataatcaggaactaggagaatcacaaaagattataattgatctaagtagtcctttatttttgcattgttcatctctatagttctgtcattatctaaagttgcagtttcccttccaattgaagggaaatacaatgtctgctgagcagaagcatgttagaatatctaaaggagaaggtaggtctgcttgtctttaacccgttaatacattcaacataattatttctatctttgcttatcttcatagtttagtgatttttatgacagaaagactgtactttatcctggtaaaatctaatacctaatttgtttcatgaagcttgaaacaagacacttttggtaaaccatttaactgtttttttgaaatgaatcatcatttgtcaagaaaaaggtggcagagtatcatctttcatttttttttttttttttttgagatggagtcttgctctgttgcccaggctggaatgcagtggtgcgatctcggctcactgcagcctctgcctcccaggttccagtgattctcctgcctcagccctctgggtagctgggattacaggcgcaccccaccacgcccggctaatttttgtatttttagtaaagacggagtttcaccgtgtgggccaggctggtctcgaactcctgacctcaggtgatctgcctgccttggccttccaaagtgctgggattacaggtgtgagccaccgtgcctggcccatctttcagtttttaaaattaatgtgatccatggttttactactgtggagaggttgctgtaagccccctttgtcatttttgataattgcttgaatcttgggtctgttattcacacagcaactgttgtcagaatacttgctttccaagaaccagctgaatttgcctcaggaaagtggggctttgtcgttacctttcagattcatcaggctgttattaggaagatagggtatagacacagccttttcagaacacatctgattcctccatacaaaagtagatggctcagaagcatggagagtggtggtaggatcattggaagaagagtagaactgttataaagtgattggtgtcattgacacaatgtcacgaggcgcctctgggagctagatggcttattgtacattaaagttccttcaagtcacattgtacacgttgtagtcaacatgctatcctctctcagtggtgtcctgacatttgaaagctagatttcttttcttcctgggccaacgttactaataactgcagagcagaatatgttcaatgaatttctatctataaaagcaaagtaaaattccaaagtaaaatcccaagtgctgtgctgtaccacctcaaagtgttagaataaagcatctgtcaggtaggtttttttttaagcactggagaaatgctttttaatagtctaggaccaaaaactttaagtctttgtggaaaagcattttgcagttagagggccatgaggctatcgctggacagaagggtggaggagcagtgaggaccggggaccgcttctgtcctctgcttgctgtgatccgtctttagctgctcccctgagcctccatggcagtcaggaagagaccagaaaaaaaagagaatctaaaagtctggaaacagaagataggtttttaatcaatgttcattaactgcatgcctttccaggcccagcagccacgcgcctgggaggggacagtgtcccacaggcagtctctgccaccaaagtaagtgccatacaggtggcaaaacacaagaagatgaatttaagaataaacagcaggatgcggcaagtgccaaaggcagcatcgggggctggagtcactttaaggaagaaggaggaattggattttcattcatttattcactcaatttctttaaccagcatttttttttaaagtgtgtgaagtgtccaagggatgtaagttaataaaagaagctatctgtagataacgttatgtaatgccctactatgtaccaggtgctgtttcaaggattttacaccattatctcaattaatcttcataacgggaagagaaaacagaagcactgagagaagtaagaagcccaggttccaaagccagggactgcagaagccgtccctggaagtcctctaaagtcattgatggccaggtgcggtgcttacgcctgtaatcccagcactttggaaggccaatgtgggagaattgcttgaggctaggagttcaagaacagcctgggtactatagcaagaccctgtctctacaaaaagtaaaccagccaggtgtggtggtacacacctctagtctcagctactcaggaggctaagacaggagaatcccttaaacccaggaggttgaggctgcagtgagtcaagatcataacactgcactccagcctttgtgacggagtgagaccctgtctcaaataaataaataatagagtcatccaagagctcatagttggggggaagatagagaaaaacacgtagtcaataaaaattcatcattctaaaaccttttctcgtgtctgttcacttgataccacctcatgaacattttccccatgtcattagaaacatttgaaatgaataaacttgatggaagcagccttttttttctgggtgatgcccattttgaggcaggcagaggccggagaagtggatgtcagagctgagaacggcagcccatgctccatagtggctaaaacaggtgtgtgggcacattggctgggggcgctgccagtctcagcaggccagtgtcaaggcagaaatgtgggcagcaacagacttgagctctccaaggtgagcatttgggcttagtaaagtccccaagccaggtgccttggccaacagacaggaacaggtggctgcgcagccagggcctgccagtgctcatcagaggcggggcagggaggggctctgatgagggctgacagctggggggtctcctgggaaggtgcttccaggaaggctggactggccatctcctaaataaacagccaaggactcccctggtggctgggtctccagtgccttaaaggaacatatactctgagtgagagagtgatcatattttttttaagagatcaagaagaggcaaaagagaattgtttagtaagaaagaaagaagtgttaaatttaaaagggtggcagggcatccttgtgatccatggatccgcataatgggttatgcaggactaaacctagaagacggctcagaggggagacatggatttagaaattagtggtaccagcattgtattatgggcaaaggaaaaagaatatagaaaggaaagcaaaagaccaatactcactttaaggaatagagagagagatagattgaaaatcagctggtagagaatttggccattttcaataatctagcttttgtttttttcctctgcctcctggctccaagcaattctcctgcctcagcctccctagtagctgggattacaggcgcctgccacacccagctaatttttgtaatttagtagagacagagtttcaccatgttgctcagcctggtctcaaaactcttgacctcaagtgatccacctggcttggcctcctaaagtgctaggattacaggcatgagccatcgcgtccatccttaaatctaacttacgttacaaaaattggcaataaatcttcttgtgtaggaaatttactttgtggacttactgtctttagtaaagtaacaaaggaactcttttagagaaaaagagttaagataaaaagaggaatacatccttaataagaaaagctactccttgaatgtagctattgacacctggtactttgccagtcagattcatatggaaaggcatacttcatttaacaaataacgatatttttgcaaatgttaaaatttccccggaatatactataaagtgaagaaagactttgatatgctgcaagatgacctcattgttgggaaggggaatggggaaaagaatgtggggtcatggcctccgtgcttatgggccttgatccccgcacatagaaatgtggtaactgcctaatcctctaagttattctgaaaaaattcctgcttttgtttttcagctcactgttgagtctgagaaggcagttttgatcatccaaacaaaaagcttaagatatttagtgatgatttgtataaattatggaaacatactgaagcagttaaaataatttggtctcaataccaattttttttcgagacagagcctggctctgtcacccaggctggagtgtagtggtactatcttggcacggtggtactatctcggctcactgcgacctctgcttcctgggctcaagcagtcctcccacctcagcctcccaagtagctgttactataggcacacgccaccgtgcctggctaatttttgtatttttgtatttttttttttttttggagagagagttttactgttgtcgcccaggctggagtgcagtagcgcggtctcagctcactgcaacctctgcctcccagattcaagcgatttttctgcctgcctcagcttcccaagtcaataggagtataggtccccaccaccatgcctggctaattttttgtatttttaatagagatggggtttcaccatgttggccaggctggtctcgaactcctgacctcaggtgatccatctgccttggcctcccaatgtgctgggattacaggcgtgagccaccacatccagcctttaatttttatattttttgtagagatgaggttttgccatgttgcctaggctggtctcaaacttctgagctcaaactatccacctgccttggcctcccaaagtgctgggataacaggcatgggccaccacgtccagcccaaatattttccaatagagtacagaagttaattcttagggccaggtgtggtggctcatgcctgtaatctcagcactttggaaggccaaggcgggcggatcatgaggtcaggagttcgagaccagtctggccaacatagtgaaaccccgtctctactaaaaatacaaaaattagccgactgtggtggtgcgtgcctgtagtcccagctactggggaggctgaggcaggagaatcacttgaactcgggaggtggggaggttgcagtgagctgagatcatgccactgtacaccaacctgggcgacaacgggagactccgtttacaaaaaaaaaaaaaaaaagggagttactttttagttccttttgggtttatggagttatagggagaagaatcaagcagtttcatcattttgaactaaattaatttttctcctggggcttttcttttttcttttctgtgttttttttttttttttttttttgagacggagtctcgctctgttgcccaggctagagtgcagtggcgcgatctcggctcactgcaagctccgcctcccgagttcacgccattctcctgcctcagcctcccgagtagctgggactacaggcgcccgccaccacgcccggctaattttttgtatttttagtagagacggggtttcaacgtgttagccaggatgctctcgatctcctgacctcatgatctgcctgccttggcctcccaaagtgctgggattacaagcgtgaaccaccgcgcccggcctcctagggcttttctttcaatgaaatgaaaagcaaattattcagcgggtctacagaaaggtattaatatattattcatatcactctactctcaggtcttggagaattggacagatagacgtaccttacgtaaccttttgggcaaatgttaactaaaaagtccataaggcagagctggcgtttggcttggaatttactggtcaggcaatgagctcatgtcagacagagggctttctataggaaatgagaacaaacaaggataccaggctagtgttttcaagataattggggtatcttggtcagtcttgtctgcttatgagagtagaaggctcacctctttggtcatgcttactgatggtgatacttgtttgattggtatctgatttatcatctgttgaattacattctttaccagctggtgttcagtgctcttccaagccatgaattgcctaattcctacatgaatcattctgcatagggagtagtgacagctttcagtgtctaacagcttatggccagcggctgctcacagtcacccagcagtggtaggaaatgggaaacgtgctggttaatccaggctatcattaaaaatagttggctttttttgttgttgttgttttttaaaggaaagttcgtgaatgtatagatttttttcatttagcagaggtgtattgagtctcctattagatcctattcacacctacatactgtggtaactagtactgaggggtggggaaggctacagaaatgaactaagatgccttgttctcaagggacagagagataagatagatatgtagagtcctcagaagttattaatttaatgtgctaagtacacagagggagtaattacatctatttagggagataagggggcatctgattagaggaggtggctttgacatggatattaaatggtaagtaagagtcccttgttagagttggaacagaaagaaggagagggccatttcaacaaagcaaatggcatgagcgaaagtgtggagatgggatttttttttgtttgtttgtttttggtgactcaccataaagatccagaagcatggggaacgtgtacagaatagtagaattacagagaccagattgtggatggctttggctgacaagctaagtgactgacacttttttttttttttcttttgagacagagtcttgctctgtcgccaggctggactgcagtggcgcttgatctcagctcactgcaacctccacctcctggattcaagtaattctcctgcctcaggctcccgagtagctggaactacaggcatgggccaccacgcccagctaattgttttatttatttatttattttttttgtattttagtagagacagggtttcaccatttctggccagaatggtctcaatctcctgacctcatgatccgcccacctccgcctcccaaagtgctgggattacaggcgtgagccaccatgctcagctgggacttacacttttattggagcaaacgagtaatatgagcaaagtttgtggggaaagtctaattttgtgtatttatagttgacatggggattggagaaaaaaaaattggagatgtggagacttatctgcagggacctggtgatgggatctttagaacaaaggtggtaggaaaggtctggaaagataaaaagggagagaggttgtggaagaagtagtgatgagacttagtgtcttgtaaatgtgtatgtcacagaatgtattaaggaagaaagagaagacaaggacaagttcgctagaaatgtgcctcaaagatctgctgaaagtaggcaagttgagtgtaggaactgatggaaggtacgattttgggttgattcgctagggaagcagttgattggaaattcatggcaaatagttattaatgatgggctggtactcaggaaagggtgctgggtcagaggaagcagaattaagggtgatgagattggggtgtacgctcaaagatctatttgatggcaggagttggaatgaggagagtcaggagttcagaagaagagttaggcggtgagaagcaatgctgtggacatcacagaggaaacagctacataacctgttagcaccttatatctgaagagtgaagacataaaggttaacgagactcctgggcagtagtggtgccataatgagggcagagaagtcgtggcagaatcaggtgtgggatctgagggatgtgtgctaccgttgggtagattgaggggtagggaatgtgaaagtgatgatttttgtttccacttttaataagatacctgcaggagagttaaaatgttctgtctaacagactgttagagatttgcaagagagtggggctacagctgtagacttaggacagttgaagagaatgagatccatgaggaactgactgattaaataaaagcagaaaagaggagaaaagaaatctggaattagagagctacaggtaaaagagcaactatgaaggatttgttggacttcattgaaggattagttatatgtgtaggagaatgaagaaaatattgcgctatatcatagaagctctggaaagggggtttcaaaaagaaggaagtagtaacagtgtcaaataaggcagacaggaaaaggaaagtaagaccggtgaaaaggttattggaattagtttttgggtggtgagggctaatgtttgattggggtagatggaagaatggaggggcccaccattatgtaacactcattttgattggctaggctaacctatgggtgttcactcaactataattctttttcctctgtggtttagtttttctttcatctttgtctgttaagtctctaagctttgtgcatctgtggtctttattcctttcatatatccaacttcattatgttctaggtataatagtaccctagagacctctgtcttttaaaacttgattctctatctatgaatcagacctgaattaaaatccaagtaattcctctgagacttcagtctctaagtctaaatctgggagcagttgcttttgatgccttctcctacctcaacaataccttcttggcctgactttttgtttcaatgtaatttaagactaaaacctggctccgttatttatgtttcatttttgagggtgcatgaagtgaaatttggggagattctctgataagtaatcacagatcgatggcctacagggatctctggcagctggaagggcaaaattcttgtcttatggaaataagttttgtttctgaagttcctttgtcatttggttgagcgaacacatttgttcctcagctcacagcaagagccataaacagtggacagcttcttgcaaaggcctaggacttatgtaacatgtaactacagtagaacccaattgccattgtcatcttattctagaggacagattcaggatataaggaatacccccaccatctttctgctcctcagtaattctaggtttccttttctctccaaccgcattcatttatttttttaacttttgtgcgtacttagtaggtatatgtatttgtgggttacatgaaatgttttgacacaggcatggaatatataataattttattgtggaaaatgatgtatctatcccgtcaagcatttatcctttgtgttacaaacaatccagttataccgttttagttattttaaaatgtgcaattaaattattgactatagtcaccctgttgtgctaccaaatactaggtcttatcattctttatttttttttggaactcattaaccatccccacctctcccacaaaccctgccactacccttcacagcttctggtaaccattcttctactctctatctccatgagttcaattgttttgatttttcgatcccacaaataaatgagaacatgtgatgtttgtctttctgtgcctggcttatttcacttaacataatggcttccagttccatccatgttattgcaaatgacaggatctcattctttttatggctgaatacttcattgtgtatatgttccacattttctttatccattcatctgttgatggactcttagattgctttcaaatcttggatattgtgaatagtgctgcaacaaacacctccaagtgtgtttatagttgtaggcgaagacagacattcttctgcacacgtggtagtgaatgtgctcatagaggattgagctccagtgggagagagttcactggagggacaccgtacactgaactgggcctttagcaggggttagggaggcccttggagaggactatacaaacggtgttcagaattcaccaatggagcaggcgtagatagcatcacgtccaagggtgaggatgcaaggaggaaatggagccctttcaggagtcctaatccttttttgaagtcttttgccctttgtattaatttaatataattaatataatttaatttttataacagcctgaggggtaggtagaacctattgccattttacagataaactaactggggttcagcaaatgaagaaaattgcggttacttacgctgcaaacaagctgatagagctggatttgaactgatctattggattcagaatctcttcgcagataccacattgcccttcatatagacaggagtaaaacctgcttatatgtagacagcttttttatggttttgtatctgaaaatccaggaccatgtattgtccatctctgatttctcatcttctcttcctcattcatttcttgtctgtgatttgttctttgggttgacatgatactccccatcctagagacagacagggtcttgtttgcatccaaaacaggaagagtttccacatctctgggagagctggtgtgtctctctgctgcattccttctatcttgggggcaggcggagcacaagtgtggctgttaggcacaacagaacagctgtagtcacccgccagttgacaccagggcacatggtgtcatggtcgcattactggagtgtgtctggctcaagctgctgcatgattggcatttattggggccatcatcaggggaagaattctatgtactttgtaagaaccatttcgtaacacctcattttccatttgccacatgttcttataaaaatatcatgaatccaggctttttgcatgaagccaaactgcagcttgcctgattcatgtactactcctgagggattctggttttgacttggcctcatgggcttccattttctgtgagatctttgaacaaagttatattttcaccctaatttcagtgtggctaaattaaatatgatgcatattttgttcaactaatatgctaagtatagaaaaaaggaccacaggggtaataaatcattaataaatttggtggtgacagctggtagattgttaccttgagaaaaataagagactcattgacaacaactaagaatagcaaatgtaaattctctttgcttagataatctttttatgaagcttcttcttttttttaatttaaaatgatgaaacgaaactaacaagtatttccttttttgttattttgcagaaaaaaccactgtctgcaataataaaggaagtctgtgatgggtaagtgttactcaggatttatctaaggcattctagttgataaattgacaagcaaataatatatttccagtaggatagtaaaatattattcataagtcacccactgacttgctcaaagtcaataagaattactgtgtaggaatatcacacccttttccaacagaattcaccattagtcctcaaagagcagaaagtgtgaaatggctgttatgtgcacagtggggttggctttatttattttaggaagttgtgttccttttgtcctacctagcagggagtactctaaaggtttttgaggacacagtatacacttgatctggtataaactgagaggaccactcaggtccccatagaggatgaaagaattgaacagacaaggcagtgggtaattgtgctgctccgtgggatctcacactgatatgactttcctacttctttgtggctgctctaaagaatacaaaggaaatgtatatatggtagctgcatgactttgtttttttttaaaccagaactgtgaaaatagttgtgttaactgaaatttatataaggtctagagtacttaattggagtgtttcaatctgcatcaactatactgataggggattgtagaatacagagacaattaaaatgtgccaactttcaaaaacttaaattgcatttattttctttgtttttctttctttgcttcaatcccttaaaataagtagaattgtaaagatttgtatttaaatctcccacaccaagccttgaggatgaactgcttaaaggtgagcagtaggcctagcatcaggtctagacagtctacacatgaaatgattggtctcagggtaatggaaggtaggctaaagtcattttgctttaggaactgcattgtggtatatgttgggattggtccaattccaatcacagggtgcttagttcatccaacactaaaaaattgtaaaaatgaaaatggccactttcatttttctaatcagtatacgcttgtatttttaaggtggtctcttgccaaccatgaatattttgcactccagcatgccgatagttcaaacttctatatcacagaaaaggtaggtcaactacattatttaatatgggatacatattgaaggaaagtaaatcatgatgatgttttctttgttcgggcctagacatgcaggtctaaattttaggtctctactatccacgaaaatagagtctgtaaagcaaacaactgctactttagaatccacaagatgatatttgccagctcaagagtaaagaccaaatatgtttcgtgtcttgtttagcaactgcagttgccttctaacagtgaatatgtctctcttactgcttggttaaagaatttatttgatacttaatgacttagttgggttttcctttctcagattttgtttttttcaaagtagcctctaacccttgcttaaagtacgtgaaataatgacaagaaaccttttcaaatgtggaattatgtatgtaggcactaagagtgttctatgaatcttgggaacccagctctctccttgggtgattttaaatcttttttagcaagattaaaggagaaggagggatttgtgaagacagcaatggccctgggagcaagtaaaattaatatgtacaagatccctgatagaggaagggcacactggaatttattgagtgcatactgcatgccaggaactgagccatgcacattacatctgtttaggatttcttccttaagactaacctgggctataaaaatactggctttggttaacaggtacgacactgagtcattgaggacaaatggttagactaatgcttcatacttgattctacaagaagcaagtttagacttttgtgcttctttgatttttgtcttttggaatttccacaatagtttcgcatccgacacaactttaggttgagctcactgaaatgcatatgagccagttttgtcttctaaactgataatcttgggggccagcagggagggaaggaacagccctggtaacagctgtcattataacaaggtggccagtgctgaaacagaagtgagtacaaagtactcttgaaggagggagaatcgggtggcctcaggcttcagtgtcttgcaggctttgtcccagtcagtagtccctagagtgactgtaattttatccatgaatcaggtggtggtagaaggtggaggcagtaacaagggttctacttccccttaggactcccttgctctaccccaaagaaggagggagggcattcagttcagcaggagagaggcctcaaaggcctgaatgcttctcagaaattgcttcgttcttcccagatgaacactgggaattttgtaactgatgctgttttcttcttcacgtcaaatgtttctttgtaacattgattgttacaaagctgggaactgggccaggtgcggtggctcacgtctgtaattccagcactttgggaggccaagggcggcagatcacttgaggtcaggagttcgagatcagcctggccaacatggtgaaaccccgtctctactaaaaatacataaattagctgggtatggtgatgggcgcctgtaatccaagctgttcgggaagctgaggtgggaggatcacttggacctgggaggcggaggttgcagtgagcagagatcgtgccactgcactccagcctgagcgacagagcgagactccatctcgagagaaaaagaaaaaacaaagctgggagttaacaagtgaacttgatttcctggcatgccttgtatattaagtttacctttgattcctttgacttaaacgtttagtttcctgtctctattttccctttgcttcagtttcttaatgtttttcatttattttatactgcatctatataatttgcatgctattctttgtgagattaaagaggttatatagaaatccaagttaaatgatagcagttaaaggtattgccatcatttcattcataccagttagtgagtagtgaaatcaattcagttagttgtcagagcattaaacactggaacatagtagagtagattaggtcagagtatatctcctgtgttgcttgtgaaatatttgttccacctacccacatgtataatacatgtagattacactggtgatttaccctgggttgtggtaaaaaagctgttgagtcgtgaatagttctggctgtgaataatctgtgctagtagatggcccctggtggtgtcctgtcttctgtcaccattgtctggagacctcagtgtagtgaagattactaaagatggggttctcagacttcatagagaacataagcatggtacagtgaacccttaaaaaaatatgtagggctttagatcccaaccccagagactcagagtgagtgggacttggatatagcctaggagttttcatttttaaggcaccctctgggcagtctcatgctggatacctggaaccactgggagaaacagccctggggcctattttctaaagagttggaacccatgtgtacaggacattatgccttctgtccagaagttgtgcacaaagttcaatttaggaatgtgggctgggcacgtggttcacatctgtaatcccagcactttgggaggccaaggcgggtgggtcacctgaggtcaggagttcgagaccagcctggccaacatggcaaaaccacgtctctactaaaaatacaaaaattagttgggtgtggtggcacatgcctgtagtcccactcaggaggctgaggcaggagtatcacttgaacctgggatgtggaggttgcagtgagccaagactgtaccactgcactccagcctaagtgacagagcaagcctccatctcaaaaacaaaaacaacaacaaaaaacaaagtatgtaggaatgtgtttgtgtgctgccatttcttggcataatttgaaaattattaacatcatataatggttatgcttttttcctgattaaaattcatatatactcagaacattcaaactattgagaatggaggaaattattattttatggtgtatcttagttattttctgggaatcttgttttgcctgaggacattcttgaagttgagtttataaaggactggccacaaagtctgtcatggagtttttcatcttcagtgggctgtagcagagattattcttttatgaagagtttaaggagtgagaagactcatcttccctatcgtagttctttgtttgtaaatacggtgtcattgctcttcctcatgcagctgtcactgggcacagctgtgggtgtgcatgtgtcacggagctcagcacgcacagagcaggagatgacggtgactcctggctccacagggtcgatcctgggctgccttcagtttgctgctttgtccatctagttccttgcaagtattcctaaaaatacagacattttttcccattttaaaaataatgtacttagcatcatcttggttacttacagcccagtgatttgttaggttatattttcatcaccatggtaaccagtgactcatttttgaaacttgtgcatgctgttagttactgattttcccttatatatgagactgtctctgtcttttcgctgaagatgaatatcaccttcagaaaatttttttcagaaaaaaaaaaaattctctagctggccaaacaatccaatagaaatagtggttgatggatgcttgtgattctcttctaagatcctccggaaggcactttccctgcttttctaatgttctccaagcccattttttgaaatagtcttcctttgcttattaggccattaactgaggtttttttttggtgcagtgggggaaaatgtcatgttaagtagcattcagcagaagcattgcttggaaatgcctcagagaaagttaagattcaatgattcacaagttcaaattctgctctagaaacttaactatttcagggtgatgtccaggagagagagagagggagagaataaaaaatgataagtgaagggtatgtttaggtggaatttgtcttttgaataagaattctactgagacagcactaagcattgttagtttatgaccctcatcacagtccaatgatgcaggtattggtgtcttcattttacgagaaaagtgagactgagagaggttactcaacaacttgtgggggttgtacaggtcagaagtggacaagctgagacttggacccaggtgggtctgaacccagagctctctatgccatctctgagaaaccctctgtaccattgcctcagccccaatttgtttatgatgccctttctttgggcatcactgtcatcaagccagtgatcctaatggtaactgcctcaaaaacaataaatacaggaagttacagactatgaacactggttaccagcttcagtctgtggcttccttattccttctgagggtaacttggaggaagttgtaacaggtaaccttccacttactagagcttcacaaagtgcatttatatttgcctttggtatggatcgtataactgcctaaggcagtatgattgcacgaataccattctttttagacaaacaggaaaattgccttgtcatccctaatcctaagcatgtatggagatgagtccccagaaaacacagggcacagtagaggaaagccatgaggaggttaggttgtgtgcttgtggataattgagattttattatgattgcaggatgatactcacttcctccatactgagacctactctagcatgtatgaagtatagtgatgtatcgctaatgtcttatttagataaattccatatcttgtaatcacagaaatacgctaagcctcattcaggccctctctgcaaagctggccccaggcacctttggtaaggaagtagggttgtttggggggcacccccttttttgtctttcccacttcctaagtgccctgggttctcagacagcccctgaacctcccagaatccctggcagccagaattgtgcactcccttggatttgtacatttcattctggtcaggagatgattccactattttgcagaattcagttcaactatcatgctttggtagatccagctgtaagtaagcagggtaatcccagtctccagaaaggattgaagcttagaggtaagcaaggatgaaggcctgggagggaatcaaaggagatggacagagagaagcctgcagtcctattttccagctctggtttctgtgcttcctgtctttgcatccttgtgagagacctgctgtgacttttcagtccccgcccctttgcttaaatcactttatgcttgtctttgttaccctcaatcaaagagctttctctagggcaggcattttaatgtgagcaaactcacgcccaggaaagctgtaaatttcctaaaccagccaaataccctatacaacattccctttcgtgctgcctttggtgaaggactctggatttgatcaactgaagtcactgtggctgcctcagcaagacacaccagcagccctgggctagctcctgttgggccagtccacaggcaataatgggtggagaaaaatgttcctgcctgatatggtttggctgtgtccccacccaaatctcatcttgaattgtagctctcataattcccacgtgttgtggttgggacctggtgggagataattgaatcaagggggaggtttcctccgtactgttctcgtggtagtgaataagtctcttgagagctgatggttctataaggggaaacccctttctcttgattttcattccctctcttgtctgctgccatgtaagatgtgcctttcgccttccaccatgattgtgaggcctccccagccacatggaactgtgagtccattaaacctctttttctttataaattacccagtctcaggtatgtctttattagcagcatgagaacggactaatacactgcttttccctttggcctgtccctttatctcttcagggtttcctgactccaagcatttctcctgtgctgcctcttcttcctgttctgagaccctgctgcctaacatgcctaacatgcctaacatgggtctcctctgttaaacccatgtcttgctacccaattatttcctttttgcctgatgaccaaacctgatttctgctatggatgttgcgtggatgcccaaaggctgcttgtattcctgtccccagcctttggcaagcactggactctcctagacaggctgcttatctgggctctgccactcatcatctgggcagccagagagaaatggacatgctgggaggaaaaaagccacatgtgaacacatccaatagaggagactagaagtgactccccagtgtgtgccaggtactgtgctaaaccctggggatatctctaaccttcctgataatcacagacaaaataaatctttacctgaaattaaccagttacagtgacaatgagtgccacaaaggagaaatgtgagtgtctgggcctaattaagccttgaggaagtgacatttaggcagagatctagaaagaaaggagggaggatagatgggaacctcttaaagtgggctagattgatggtgtgcagagaaatagtgataaagccagcgtaggaccatccagatgtggctggaaagttttgcatatgccctgattgtcaaggctttttaaggtcatcttaaagatcttgaacttcatcctaagatcatagggaagccttgagatggttttaagctggacttgatgacaaacgattggattgcagacttccttgtgattactctgaatacactctgttggaagaattgtcagcctatggcagaaacagtgagaaaactgttgaatggagaggaaaagaatgcatgggtgttttattttttaattaattaattatttatttatttgagacagagtcttgctctgtcgggcaggctggagtgcagtggcgcaatcttggctcactgcaacctccatctcccaggctcaagcaattctcctgcctcatcctgccaagtagctgggattacaggcatgtgccaccatgcgcggctaatttttgtatttttagtagagatggggtttcaccatgttggccaggctggtcttttaattcctgacctcaggtaatctgcccgcctcggcctcccacagtgctgggattacagacgtgagccaccacacccagctgcatggttgttttaaaattcgcatagagattgacaacaaatgctgggtagcactttgagtccaaggaaaacatagaacgagatgatagtcttaaatgtctgccttcgaagagcttactatctattatctccttgacagcttggctgagggtagtaatgatacactgcagttgaataaaacagctcattttatttatttccaaagtgatatcttcttgataaatttgcctgtttacacagcctgataaaatgttaatattcggttacctgatgtattcattcctgtcctttctcatgctgctataaggacatacctgagactgggtaatttataaaggaaagaggtttaattgactcacagttccgcagggctgggtaggcctcaggaaactgacaatcacggtggaagggaaagcaaacatgtccttcttcacatggaggcagcaaggagaagtgcagagtgaagtggggagagccccttataaagccccttataaagccatcaggtctgtgagaacagaatggaggtaaccacccccatgattcagttacctcccatcggcacgtgggaattatgggaactacagttcaagatgagatttgggtggagacacagccaaaacatgtcacctgactaatttatatcaaattttaacttcccctttggacatacctaattttaggattcagacactcctagcataggactttaagaaggagaaatggatttgcccagatttgacagttaatgtgctgcaatgagaaagataattaaggtacagtccttgtctccatagagttttcaatctagaggaagattgggttgataacaattccagtcattggggtaattagaaggggtcctgtgtgaagagattattaggaatatgatttttgagtcactaggtttataatttgaccatatgattctgtgtaccttaaaaaaccttttgactaggatatgaactcttctttttttttaacatcataattgaggtaagatttatacaccctagaatttgcccatgtaaagtgtacaatgcaatggtttttattatattcatagagttctgcagtgctttatttttttgatagcaaagctgtgatatttccacctccagtattttcatcttccaaagctcttagccttaaatgtagattttggctccaaatttagagatttggattctgtagttcaaggctaaggttcaggcatctttaacaagtacagctggtcctagtaccaagctcaaacactttccagtggaacagtgagcagcctttggatctttccactattcctgcatgagatgaaaaaccatattttgaattcatactggcttgtaggcatggactccccatgcactccctgagctgagggtgtcattctgattggtttccactgttgccaacagagaatgaagtccaacctcctttcttaagccagtgttcaaggtgcatcacaagtcaacattttcaattttattctttctcttattccttcaattttagccaaactgctgtagtgttctctaaatatatgttgatttgtctccttggtgtagctttactaacctggaattcagttctctttatctccctcctattatttcaggtactagattaggtgctaaggataaagagatgaaatgacatactccttgcttcgaaagctgaatcttagaaacaaacacacacctaggagcaatatcatttaaatgactgccatttcaggacaacagttcatcctcttcttaccaatcctaaattgtttgagctggaagaaaccctggcttcttgcctaacataactgtagccccacttttggagattcgtctcttaattcagtcctcttataaatctctacccctcctctctgctgctacaggtattattgtctactagttctttttctctcaggtatctgttagctgatcaggacctacatcgctttatcgttgtcttgaactgttgtttaactatttctgtgctgatttatgttttcctctcagcaaggttccaagtactttacaatcaaaaactgtatattccagctctgtgtctcacgtggttctgtgaatataatatgtaggtgttggaagattgtgggttttatgttacatagttttctttgtaagataagaatacaattagttgcttaataaattatgtatgatgttggttaattcaattaccagaagacgcacatacacattaagattattcacagtggagaaattgtagagtgaataaatgaatcttaatgttcctcttagagtcttaaaatggtgttaaaaagtttagtttggctttcagtctgcaacaactgattaattaccttttgaaaagaaatatgcacatacacacacacacacacacacacactatctgtactgtgctggatattgaccaaaaattcttaaaagatacaagggaaataaggaacagagaccgtctggtcccttataatatacaaataaccatcacgatgcagatcatcaaacagtaatacagtttcaaagtattatcacttttgttctcattatagcaaataacgtcctctaagaaccaaatggtgtttgtgagagataatgtactcaaaattatgttactgctcaattttgagaaagtgagttttactttatttcaccctaggctaagatccattaataatcacatgactcaccatcttcagttctttatttcaggcagttggctctgtgggagcagcatcacagaagagtagagagaattgttggcttacatacatacaaaactttagagcttctgtgaaggaaaacatgggcactgacttagaaaccttgccgatattttctcccctaccccccacacgctttttcattaaataaaggaaaaactttgcacagtcacactccactgtggtgacacattttccaataaccgaggaacaactgaatgcaactatttgcagttagaattctctgtacgtatgtgaaaacaagccacttaaaacaaaacttggagcagcaattttggaaaacaggaaaaactctgaaatatgccatctagtttgcttgcaacacagaaatcgtgaaccaagagtgttttactttcttttctttctatttttttggagacagagtctcgctctgtcgcccaggctgaagcgcagtggcgcaatctcggctcactgcaacctccacctcccgggttcaagcgattctcctgcctcagcttcctgagtagctgggattacaggcgcacgccaccacacccagctaatttttgtatttttagtagagacagagtttcaccatgttggtcaggctggtcttgaactcctgacctcaggttatccacctgcctcagcctcccaaagtgctgggattacaggcgtgagccgccgtgcccagacgcctctgccctttctcaatccatcaagcacaacttgtgaaaattgaagtgcatatgtacacacacacacgcacacacacacaccctcacacaccctcctcagattgtcctgacttcccctaggagctatccagccctggcattgggcttcagccagccattcctctttccatcatcgtcacccctcttttgccctggtgtctttgctcatagtgactcaaactaaattggcagtagactttctgaagctgtctctaaaaacatttttgggtggttttagacttttctaattagagtttgggaactggatgggagctatcattttaaatcatttgctatgtttcctctagagaggacttggaagcatatatacttatttcaggatgaagaaaaaaaaacagcctaagttgagtcacctaaatgagagggagctcggaagagcagggcagcgaccgccaccagcattactcagatgtcggtgggttttatgacatgttatttaatgtttacactgacggttggatagaggctataacaagatgattacacaggcagctaactttgtagcttaggctccctagcttatgcttggtaagatgcaactgcctctagaattgcaggcaaggacaaatgccagaggtcatgatcattccatgttctccagttcagctatgaaactaatgaatagattgactgaagtactgaaacatttaactgtgtaatgctcagatacagaatgagtgacacgtgggtttcctccaaacaggcacttctttaccaaaaatgaccctaaaaacaccagaacactttttccaaacaaaactaactacagtgaaaagcaaaaaccattattagtaaagaagattacttctaagaatggctctgtgattcttataatttgtttcaaggccagaaacttaattgcagatcttctaagcatactcctgttcatgtttttatacttctaaaatgagatttattgttgaacagcaatcagattatgttgggcaaagttttgaaatatacactgtgtatatttttgtgtgtttgtgtgtcatgggtaaatgaaatatcgatgaaaaaatagtgactttactacttggaatgcctttttgttgtttttagtctgttttctatttttaaaatatttgttagaacccatcaggatgattttatgactactgatggttgtgctccacagatggaaaaacatttcattacactctttgctctacaaggtcagaaacaaagctagattcctttacttcggttatcccagtgtctagcacagtgctctataaacatttgtttaatggaataacgaacatctactatgagcataaactggtgacccaagggcaggcatagggggcaggcatgaaaaagaccaaaaagaaaaggagaaatagaagaaaggtagaaagttaggcggaaagtctggggagagataagaggaagatgaacttatctctacccaggaaaggtagtgtgcctgcaactcttttctggaggtgacactcagtaacattagggccctaggttgcccattctttccactgtgatcagaatcaagttacaataatttattgtctgattgtttctttctgatccccattgttctggttatctattggggcattaaaaaacaccccaaatttagtaacctaaagcaaaaattcattatcagtagagatgattacttatactcactgtttctccaggccaggatttggacatgacatcttcccatccatgatggcttgtctcttcttgatgtctggagtcacaactgggaagacatgaatagctgggggctagaatcatttggaagcctcttcttcactcatgtctggcttctgggcttggatgcctcaaagactgggctcagttgggatggtaaacttgagtgccctacatatgtcctttccatgtggcttgggcttccccacagcatggtggcaatgttctgagaaggagttccaacaagagggcacttccagagagggagtgtttgaagagaaccaagcagaagctgcatggctcgttatgacctagccttagaggtttacaggatcatttctgctgtactttatctctccaagtagtcacaagcctgccctgattagaggggatgagacatagcctggtgcatggcacacacctgttgtcccagctatggggactgaggtgtctgcaggctgtgttgaactgtgattgtacctgtgaatagccactgcacttcagcctgggcaatattgctagactcttgtctttaaaaaaaggggaatggaggtgggacatagactcctcctccccatggaaggagtggcaaagaatctgggggctttttaattaaaccacccatcatttctttacatttctctttcagggaaaagttgtcagataggtatactattttccagaagttatccgaaggttaaactgtgtcttttacttttgcaattatttaactttttaaaccaagaggaaggacaaagagataaagtaagaaaaatagaagaaagtgtgcatcatacaaacatagagcagcaacagtgaggtaattttctccattgataaatgatagagatctattgcttcttttaaacgtggggtgggggaacaataatcgtgtaaaccaagaaatttagagggagtttatttggcactttgatatttacaccttcttttgagcacaattttgggagaaattgggattcaccgcctttaccatgtctgaagattaaagtcaaaaaataaaagtgactgctttgttgccatcaactgcacttgtaaagcagtaacgattctttatttttccaaggcagccttgttcttggtgctttgactgagagaaagggctggagaggggtgggtgggtgggtgaactgcagctctttactgtctctgggaatggcgtaagtcaaggcaaccttggtcatcaagcacaagcttcatttgcttttgaactcctatgggggagaaatactacaaaacacaaactttaaaagtgattcattgtgatcttatctgagatttttcatttcattaggagataaagaggagagaataacttcctcttccaatagttttttttttttctgatatattctcatttctcattttttctctgctccctaatgcttatttttctttctcctctggcccttttccttctgattgtttttccttcctttccttctctccatgacttcattcttattttgctccatctcttcctcactaccatctcctttattgagttattagccatctttttaaaaacttcctagtcttacaacaaaaaatgataaaggggatatcaccaccgatcccacagaaatacaaactaccatcagagaatactacaaacacctctacgcaaataaactagaaaatctagaagaaatggataaattcctcgacacatacactctcccaagactaaaccaggaagaagttgaatctcttaatagaccaataacaggagctgaaattgtggcaataatcaatagcttaccaaccaaaaagagtccaggaccagatggcttcacagctgaattctaccagaggtacaaggaggaactggtaccattccttctgaaactattccaatcaatagaaaaagagggaatcctccctaactcatttatgaggccagcatcattctgataccaaagccgggcagagacacaaccaaaaaagagaattttagaccaatatccttgatgaacattgatgcaaaaatcctcaataaaatactggcaaaccgaatccagcagcacatcaaaaagcttatccaccatgatcaagtgggcttcatccctgggatgcaaggctggttcaatatacacaaatcaataaacataatccagcatataaacagagccaaagacaaaaaccacatgattatctcaatagatgcagaaaaagcctttgacaaaattcaacaacccttcatgctaaaaactctcaataaattaggtattgatgggacgtatttcaaaataataagagctatctatgacaaacccacagccaatatcatactgaatgggcaaaaactggaagcattccctttgaaaactggcacaagacagggatgccctctctcaccactcctattcaacatagtgttggaagttctggccagggcaattaggcaggagaaggaaataaagggtattcaattaggaaaagaggaagtcaaattgtccctgtttgcagatgacatgattgtatatctagaaaaccccattgtctcagcccaaaatctccttaagctgataagcaacttcagcaaagtctcaggatacaaaatcaatgtacaaaaatcacaagcattcttatacaccaacaacagacaaacagagagccaaatcatgagtgaactcccattcacaattgcttcaaagagaataaaatacctaggaatccaacttacaagggatgtgaaggacctcttcaaggagaactacaaaccactgctcaaggaaataaaagaggatacaaacaaatggaagaacattccatgctcatgggtaggaagaatcaatattgtgaaaatggccatactgcccaaggtaatttacagattcaatgccatccccatcaagctaccagtgactttcttcacagaattggaaaaaactactttaaagttcatatggaaccaaaaaagaggccgcatcgccaagtcaatcctaagccaaaagaacaaagctggaggcatcacactacctgacttcaaactttactacaaggctacagtaaccaaaacagcatggtactggtaccaaaacagagatatagatcaatggaacagaacagagccctcagaaataacgccgcatacctacaactgtctgatctttgacaaacctgagaaaagaaatgggggaaaggattccctatttaataaatggtgctgggaaaactggctagccatatgtagaaagctgaaactggatcccttccttacaccttatacaaaaatcaattcaagatggattaaagacttaaacgttagacctaaaaccataaaaaccctagaagaaaacctaggcattaccattcaggacataggcatgggcaaggacttcatgtccaaaacaccaaaagcaatggcaactaaagagcttctgcacagcaaaagaaactaccatcagagtgaacaggcaacctacaaaaatgggagaaaattttcacaacctactcatctgacaaagggctaatacccagaatctacaatgaactcaaacaaatttacaagaaaaaaacaaacaaccccatcaaaaagtgggcgaaggacatgaacagacacttctcaaaagaagacatttatgcagccaaaaaacacatgaaaaaatgttcatcatcactggccatcagagaaatgcaaatcaaaaccacaatgagataccatctcacaccagttagaatggcaatcattaaaaagtcaggaaacaacaggtgctggagaggatgtggagaaataggaacacttttacactgttggtgggactgtaaactagttcaaccattgtggaagtgagtgtggcgattcctcagggatctagaactagaaataccatttgacccagccatcccattactgggtatatacccaaatgactataaatcatgctgctataaagacacatgtacacgtatgtttattgcggcattattcacaatagcaaagacttggaagcaacccaaatgtccaacaatgatagactggattaagaaaatgtggcacatatacaccatggaatactatgcagccataaaaaatgatgagttcatgtcctttgtagggacatggatgaaattggaaatcatcattctctgtaaactatcgcaagaacaaaaaaccaaacaccgcatattctcactcataggtgggaattgaacaatgagaacacatggacacaggaaggggaatatcacactctggggactgtggtggggtcgggggagggaggagggatagcattgggagatatacctaatgctagatgacgagttagtgggtgcagcacaccagcatggcacatgtatacatatgtaactaacctgcacaatgtgcacatgtaccctaaaacttaaagtataataaaaaaaaaaactcttaaaaaaaaaaaacaaaaaaaacttcctagtcttgtccacctacttttattctacctttttgatgttcaggtcccccctctcttgtagctctagacttgtcagcactgtagttaggtttagatttttagatgctaaaaaatgaggtaccactttactgatttaatacaactagtataaagcattcttttttcagtgtctgctgctctgaagcaagcagatacaaaatctcaagtatcttcaaaaaacatttacacagattaggcatattgagacatattagaaaaaagtaaattaaaaaaagatcaaaatcctattacttagagaaaaccaatggcattctactgtatctacttcaaacatatttaagtctagaagtatatttgtgttttacaagtgtgtaaaatatacacattgtttcacagctctagacttaatatatagcagccatcataacacagtagttagtatactcagcctactttattatataatgaggattaaacaaggtaatgccaacaacacagtttgcaaggcacttggcccatagtcattcctcagtgagtcatatttcctatttatttgtcaaactttcctaatggctgaaaagaattcaactcaattcttgaagtcagttctttgtatttggacttttaaattgtttatcttcctctctctgtcttttttttttttcaagcagtgctaaaggggccattcttcaaagtaagtctttatgtagttccttaactatttcattataaactattgataaaagttgaatgatgagtcaaagaaattgtgtcatctaggtatatgtggccatcatttatggaggaccccctaggtgccaggcactttcatgagttatttcatttaagcttttaggattcacagtagtcttagacatttgggagttttaggtcacatagcttctgaatgccggaattggaactgaaataagatcttttatattattgtgaagaaagttccatttcagcaacttttcacaggtgcttcaggaattgcagaaggagttgacttatacaacctttaaaaatattgttttgaatgatttaaacatgaataaaacaatcagcgtaaactctgataatggataggagcacagtgaaggcaagctttattattattattaagatgccaggctaagttgattttgagagagcctcaatataaagcatttcatttcctcctcccccatgcatatatttacacttcttataaaatatgtcattgactgggaagattgcttttatcttaaatcaggcatgaatccacccactcaagaaaaatcatctcagcaagttcgctgctgctgcacctgtgtccttggctcatggaaggtcagggatagttcaggcgtattggcttgagagcatgtcaggtgtctaatgaaagagaaaacctaattttcctcttttctgtaagttttgagtacttttccccgatttccagtatttattataagaaaggagttgagattagatgttatttatacaaatttacatgatgaaataaatatccaagtatctggaaagattcctgagatttcaaggtaaacttttaaaagcaatttccagctaatgctctgtgttgacagataatgccttgtgtatgatatggtaagtggaattctgagatggccccaagattcccacacccctagtgttacacacccatctaatccctgtctcttgaatgtgatctgggtctgtgaataagaggggctatcacttctgtgattgtgtcacagcgtatggcaacgaggattttgtaggtgtcattaaggtcttcaatcagtcgatttgggagtaatcaaaagggagaatatcttggtaggcctgacctaatcagatagacttttaaaagaaggtgaagcattaacgagatgtcttcctgttggccccgagaaatagcgaactgccatgttgtggagagggctacagagaaaggccctaagatcaacctctcagagctgagaggggtccctggccaacagccagtgggaaatagagggaagagggatcttggttgtgtaatcacaagaaatgaattctacaacaacctgagtgaatgtggaagagggctctgaatttcaaatgaggacccagctgactgacaccttgatttcacccctcacagacacccagctaaaaggtgctagactcctgatccatagaaactgtggagacagctaaaaggtgctagactcctgatccatagaaactgtggagataaatatatctgtgctgttttaaactcttagatttctggtaatttgttatacagcaatggaaaactggtaaatacacggtgggaatgtattcacgtttcctccacattaagtaaggcaacaacacacaaaagcgtattgaatgtggaagcttgctatattattataatgatcacctataatatcagagattgagtttttatgttaataaaagtcttattattcctgcctattaccttaataaaatatacattgacaaacctaagctcaaaaaacatattaatgttgatacaatacttctttctctatttgggctctgaggcattatctgagctttttttcctccttctagaacaaaaagtttccattatttgaaaacaactgtcttgactaataggtgctttttaaaaagactgcattttggttgttgtaagaatgtaactgttggcagggaaaggaaaagcaagattgtgcaaggctaatttatagtcagtacattgtttcaaagtgtatgtttatctttaattgttctctcattacaaagtaaagcatagatgtaagaaatccagccatcgtttcagacagatgagttttgtgctagtgatactgttttttaaagtcagaattcatttaagtagtaatttaaaaacttttaaatcatacaatatttcaaacatatcaaaaaactacaaaaaatgatataactgacacttgtacagcccactgtctggatgttgatagatgttaacattttgcctactgttttgcatcacctttaaaaaaccttccaagcatagctaaaaccttactctatcaaattttctatctctccttctattcctctctccccagaggtaagtagtagcctgaaattgaagtatatcattctcatgaatgttttataggttttctacataggtatgtgcttatgaataatatcaagaattgttttatgtgttaaaatttaaagcattgatatcctactctaggtaacttttgcatttaattttttcactcagtaatatttttgagatgaatttttttttttttttgaggcggagttttgttgttgttgcccaggctggagtgcgatggcggattgtggctcattgcaacctccgcctcttgggttcaagtgattctcctgcctcagcctcccaagtagctggggttacaggcgcctgccaccacacccagctaatttttgtatttgtagtagagaaggggtttcactgtgttggccaggctggtctcgaacttctgacctcaggcgatccacctgcctctgcctcccaaagtgttgggattacaggcgtgagcccccgcgcctggcctgagatgaatttatgatatcccatgacataaataaaacacagttgatttatccatttttttaaccaataatcacttgtttcctcaattttggtatcacaaagaatactgtactatgcatgtatttgtgtggggctgtttaaaagtttctctagaatagaatgtagaaagcttttggattagagggaaggtcattctcaactttactgcttttcaaagtggttctactagcttgcagtcccacccgcaattatcagcttttctattcccgtcaccctgaccagtgcttgtttgcatagcctggctaatgttagccatggctaggacaccatgggacttctcctgtccttttttttttttttttaaatggcttctcgctcagtcacctaggctggagtgcagtggcaggatctcggctcactgcaacctccgcctcccgggttcaagggattctcctgtctcagcctcccaagtagctgggattataggtgcaaaggagagaatacccaagcctatgagtagaaaagtgggttatgtgcaaagaattaaacaggcagatcaagatcttcttgcagtgtgaagtcaacgtaaacatagttccagatttgtattgattctgaaaatatattaatcttttacctgtattttaaaaagtatatgccatctgaatgagagaaaacatcagataacaaattcaagagtgtaagttttatggtgtcaaaagggcagtaacaactgataactcttagttcaaataactgtataaaatttactcaatgacaccaaaagcaaatctcaattttatatatatgaaagaagatatagactacagaagttatttaattaaaatcttagtggaaaacttaaaattatattgtgaaacccaggaatgaaattgattatgatagaaaaaagtttttaaatttaacagttccttttttttttttttttttggatatagagtttcactctttttttttattattattattatttttttttttattgatcattcttgggtgtttcttacagagggggatttggcagggtcacaggacaatagtggagggaaggtcagcagataaacaagtgaacaaaggtctctggttttcctaggcagaggaccctgcggccttccgcagtgtttgtgtccctgggtacttgagattagggagtggtgatgactcttaaggagcatgctgccttcaagcatctgtttaacaaagcacaacttgcaccgcccttaatccattcaaccctgagtggatacagcacatgtgtcagagagcacagggttgggggtaaggtcaccgatcaacaggatcccaaggcagaagaatttttcttagtacagaacaaaatgaaaagtctcccatgtctacctctttctacacagacacggcaaccacccgatttctcaatcttttccccacctttcccccctttctattctacaaaaccgccattgtcatcatggcccattctcaatgagctgttgggtacacctcccagacggggtggtggccgggcagaggggctcctcacttcccagtaggcgcggccaggcagaggcgcccctcacctcccagacggggtggctggccggacggggggctgacccccccccacctccctcccggacggggcggctggccgggcagggggctgacccccccacctccctcccggacggggcggctggctgggcagagtggctcctcacttcccagtaggggcggccgggcagaggcgcccctcacttcccggacggggcggctggccaggcgggggactgaccccgccacctccctcccggacggggcggctggccgggcagaggggctcctcacttcccagtaggggtggccgggcagaggcgcccctcacctcccggacagggcggctggccgggcggggggctgacccccccacctccctccctcccagacggggtggctggccgggcggggggctgacccccccacctccctcccggacggggcggctgccgggcggagacgctcctcacttcccagacggggtggctgctgggcggaggggctcctcacttctcagacggggcgtccaggcagagacgctcctcacatcccggacggggcagcagggcagaggtgctccccacatctcagacgatgggcggccgggcagagacgctcctcacttcccagatgtgatggcggccgggaagaggcgctcctcacttcctagatgggatggcggccaggcagagacgctcctcactttccagactgggcagccaggcagaggggctcctcacatcgcagatgatgggcggccaggcggagacgctcctcacttcccagacggggtggcggccgggcagaggctgcaatctcggcactttgggaggccaaggcaggaggctgggaggtggaggttgtagcgagccgagatcacgccactgcactccagcctgggcaccattgagcactgagtgaacgagactccgtctgcaatcccggcacctcgggaggccgaggctggcggatcactcgcggttaggagctggagaccagcccggccaacacagcgaatccccatctccaccaaaaaaatacgaaaaccagtcaggcgtggcggtgcgcgcctgcaatcgcaggtactgggcaagctgaggcaggagaatcaggcagggaggttgcagtgagccgagatggcagcagtaccgtccagcttcggctcggcatcagagggagaccgtggaaagagagggagagggagaccgtgggcagagggagagggagggggagggggagggagagggagcagagtttcactcttgtagcccaggctgcggtgcagtggtgtgatctcggctcactgcaacctccacttcccgggttcaagctattcttctgcctcagcctcctgagtagctgggactacaggcacccacccccacacctggctaatttttgtatttttagtagagacggagtttcaccatgttggccaggctggtctcaaactcctgacctcaggtgatccacccacctcggccttccacagtgctgggattataagcatgggccaccacgcctggcctacgtgtctttaatttgcatttctccaactgctgaggctgagcatatttttctgtgtttattatctagtcagttttcccttctataaactgcctatacattctttgtccaatagtgggtttggagtgtttcattgtcatggatttacaggagttgtttatatgttgtggacacaaattctttttcctaaatttctacccagtccatagttgttttttctattgtgtcttttgtcaaacagaggtttataagaccattttaatcaatcagatttgtccttttttcccttttgttacttgggctttttgcattttatttaaaagcactttctctagctatatattttaaagagattctcttgtgttttatttcaaaagttagaaagttttgattttcatataggtcatcaatctattttgaaagtgtgtgtagggggtattatatggcgatctaattttatcttttgatggagacagccagttgtcttaccactgtttattgcattattcattacctatctgccacttccatgacttgcattgtcacttctttcatatgtcaaggttttgtgaatataggggtttctgtggctctctattttgtaccattatcatacagctttgatagcttccaactaacaagactagatttctagtagagtgaatgtctgtgcctttttcttcctctttctcttctcttcttcagtgtcatcatcttcttgttcttctttttctcttcctctgttcttcctcttcttctctgtcatcatcatcatcatcatcaaaatcaccctgcttctgccttttactcctccatatgaattttagcatatgcttgtcaaatcccattagaattttgattaaaattgaattgaatttatggactaattttgggaaaaatttgcattctctaagatattgcctatcccatctatgaaaacaatatattgttctatttattagaatattctttaacattttcaataaagcttaaccatttttgcccttaaagtttttatacgtatatttagtaagatatatgcctaggtacctcagaattttgtatccatcataaattgtacgtgttttaagcacttccattgtttatagctgtttatatagctcttattgaatagtttctgtgtatagcaaattctgttgagcttaattaatttctgcaaatacactgagatgtatttatcatcttttaaagattaacaaaataagtatcagagattacataattttaatatgattatatatgactagtgtacaccctggatttgaacttagttttagctaaatctttacctttttctgagagcctttccttttacatcagctaatgtttctctgacgtatgttatcttgtttagcaggattttttttaatactaaaaaactaaaatctcattatagagcctgtatgtgaaagaggcacttaattcacccagtatatgtctcttaatatcagttaattaattcatctggatagccacattcatggcagagagtaagtctataaaataaatgctttttctggtcattatctttggatcagctcttaaggaaaacacccatcctaattgaattagcgtggctttcccaattgctcactgtcttacttatgcttaggcctatgttgcattagtccctcccaacagatctggaggcaaggcctagagcatagtgtgggtggtccagggccaaaggagaaaagctaatgtggtaaggtaagatgaagacaagtttttaatgcttgtaatgttgaactgtttaactctctcctctgacacctagtatccctactaactcctccagaaaagcctcagattttaatttcactcctggcaaaaaaaagagaaaatagagaagatagagggaaaaaaatctcgaatgcaatgcaagtgaaagcccattctttctctggtgtgtgctgctgggttgtttgcttccagctgtcagtccagatcccatttgtctggggtttctttctggcatcctctcttcgtctcatactaggcccttcctcttagggctggagcaggtgcatttctgggaatggttctggacagctttttgagcctcagagcacagtagttatagatgcctggggctgtttgtaactttgcttcagtgttgaggctgcctggtgctgtggcgttagtgaacagctgatgacagatggttcatttctgtgcaggatgtgttgcagacatgtggattggtagtggaacctgagcaaatatatctcaactctctcttttaaaaaatgcttaataataagtgtgcccatagtaggtatgaaataaatatccactcgttgactgaaggttatagcatagggaaagaaaggaaagatggtttgaaatttatttggattgtgagagaggggaaggggttgttaccagtgagctttagtttatagatattttcactattgttccagactctgttatgattataatattcattctattcactcaaaaagcatttgatgaacacatttgatataccaggcaccattcaaggcactggtgatgaactaaacatggagatgcccattcttcttgggcatctgttcttttgggtgtggaaactgacaggaaagacttagaaaacgaacaaggcaattaattttagatcgaggtaagagctatgaggaaaatggagtaggacagcccccaaaaaagacatgggggcagagtgtggtaggtgttgctgctttggtttaccctgctaagtgcttggccatagaatataggttcaagtatgacccagaaatatgacttgcctaggttcatgtttataaacaaccagatttcaaaaaataagactacatgtgggtgtacatggtttccagaattgagggcttaaggcctttcatcctccaaccatatgagtgtcaaaacttatacactaaggcagtcattccgccatcaagatttgtgctaaccaaggttaatgtctgggttctccatcttcgcaatgtggttgtgccagcttggggcaatcagcctcactctgcaaggccctggttgtccatctgtaggccttggccaagattgctttaaggtatcagggaaggtctctttaaagaggtgacacaaggtggggcatgtaatcctcatgcctgtaatcccagcactttgggaggatgaggtgggcggatcacctgaggtggagagttcaagaccagcctgaccaacatggagaaaccccatctctactaataatacaaaaatgagccgggcatggtggcgcatgcctgtaattccagctacttgggaggctgaggcaggagaatcgcttgaacccaggaggcagagattgcagtgagccgagatcgtgccattgcactccagcctggggaacaagagtgaaactccatctcaaaaaaaaaaaagtgacactttgggaggccaaggctggcagatcacctgaggtcaggagtttgagacccacctggccaacatggtgaaaccctgtctctaccaaaaatacaaaaattagctgggtgtggtggtgcacacctgtaatccaaactacttgggagactgaggcagaagaattgcttgacctgggaggcagaggtttcagtgagctgagatcgcaccactgcactccagcctgggcaacagagtgagactctgtctcaaacaaacaaacaaataaacaaaaaaaaggtgacatttgagccaagactggaggataacagggagccagaccctagcattgtaggaaaagaaacagccagcagaaaagtcctgcagcatgaaagagcttggtgtgttagagaacaaaagggaacaggatagtgagctggaagtgagaggaggtaccagagaaattgtcgatgttgactagggctgcatcacagtgtcttctaaactatagtgggaatttggatctccttccaagtacaatgaaaagctactattttatcctggggttcatgaacttatgtaggaggaacactacagccatataaaaacgtaaacttttcattgcttgaatcacaaatgtcagcaacaagccatgataggataagcagtatctgtgcctttattatgaacagaaattaaagtacatccatttattactgtttatcacagttatctctaaatatcatttatcatcttatgcctaattagaaattatggtagttattagaccttacaacagatcttgttatttaatgctttaatacaggggtcagcaactatagcctgtggactatgtccaagctgccacctgtttttgtacataaaacttactggaacacagccaaacccatttatttacatatcacagttgcaacagaggtattctagcctgcagtgcttaaaatgcttactgtctggctggaaaaagattgctgacacgtgcattgataaagcagcatatatattactatgatacaatttttttttttttttttgagaaggagtctcttgctctgttgcccagactggagtgcagtggcgtgatctcggctcattgcaacctccacctcccgggttcaagcgatccttctgtctcagcctctcaaatagctggaactataggcatatgccaccacgcctggctaatttttgtatttttagtagagacagggtttcaccgtattggccaggctgctgtcaaactcctgacctcgtgatctgcccgcctccacctcccaaagtgctgggattagaggcatgagccactgtgcccagcctatgatacaatttttaaaatatttggataactgtttggtttctttgcaagcttatttattttattttatgcatttaaaaacattctgaaaagaagatccatagacttcaccagagttctctaagacatccatgactaggaaaaaaagagaaagaaaaagaatccctatatttcattatctaaggctggggatccaaatgggcggacttgtatttatttcctctgcctgagattctctcccttctctccctccttctttggcagattttccatttcttttggagtgtggtactgaagctgcctcctttttatgaataatatattggatcctacacatttactgaatgagccaagcagaggctttattagcagtgtccagtgtaatgcccataataacactgtgtggtgtgggtctgactgtcttcatgtggcactgcagaaagggaggccccaagacgttgtcttgcccatcattcatttaccctgtattcactgagcacctattgcttgccaggggctgtgccaaattcccaggtgacaaagctgttactggtgaagccaagttttggatcaggcccatctgacactagtgtctgggtggctaatgccacagcaggttatgttcaggatgtcatgtgacaccctgctgcctcaagcttggccactcctccatccctagtgtttccagccgcattgttccttggctgtgagctgtaaatgtttttatctcatcctctctccacagaccactatttgcattgttttgcctagaatgggccatggagttagtattttcccagctgtagtagcatcttcagtgatccctgctcatgccactggaatggccctttaaaaatgtttttttttttctttttacaagcatgagtttctttcctataagtgcagctcttttttcttgtctctgtagcactttgtggctttctgagaccacaggctctaacttgcccattgcaccccatgtttaagcatttgcacatgtcgtttgattgaggggtaagttaaaactgctggcagtgggaagggctggcaatcaggtctcttatctcaagtggatggaaaaataaggctgttcaacgtggttcgctcaactcgtacaggtcccttctgtgcaaaaccagggagattgcttctcccctggaaacacaggcactcctcattggctgggttgggcaaatacccataatattaggcatttttcctgcttttttccccttcttttgcaggttgcaagtgatggcaatgtacatgggattctcaaactggtcaccagtacttagtgcatgaacacacattatattctatatgtttggtgcaattttgctattttgcattctgcttttgtcaccacaatacagtgtcccagggtcccatattactgaacattctttcatagcagcacttcgatggctacatggtgtatctttggcctgccttaccataatttgcttcagttttcctttgtgttaggggacatttgcaagactttgtatatcagccagcatctagtcaggatacagaaaccatactgttatttaaacagggtatattccaatgtaaatgattgacaactagtagaagctggttagttgtgagtaaaagagaactcttatgggtccagaagaagctgttgcagaaaagaagctatggcctccagtttgaggaagagtgggcagttgaggaactaaagaccaagagcgggcattgctcgtcccccagagttcttcagagagggcatggccaccacagggacatcaccacccacgggtgatgcagaaacttgtcagaggaaagcagctggccagctggctgtgcagcactatagacgtgtctctgttgccagaagcttgggtaggcagaactgctttgaagcagtccctggtagggagagcagagcccgggtgcaggaggcctgaggccttccccatggaatagtaatggtggatcccaaagggaatgtcctttccccaggcagaatcactccagtgccctctattggtgaagtgtcacattgccgcagctggcaacctgtcagaaagcagggccaagaatggttttgagttgagagacaataaatgaataactggaatatttgggcttgcttttagcttttttttttctttaaaccgttttgcagtaaacatctttcataaaatgttgattgcatctctgatatgttggtaggataaattcatagaatttgaacatttcaaaggccttagtcatatgttacaaaaccatcctattgactctcctagttgttgtatatgggagcaaaggcatatagccttgttatagaacttgttactccttaaccttttgaatcttggccttgtttgctgggttgttaactctgaggctgggagatgctcagagccagcgatgtcaaggttggagcctgcagtctgatgtaataagggccaagctctgccgtggagggagggagtagtgtgttgctgaagtcctccctcacctcgctcagtcttctgaacgcattcccttcccatctcattcactgcttcaacaaattcattccctaaaacatccccttcatcacatcagtaatcttgctcaaaagctgtaaatgtttcctctttgtttatggcaatgcaaatgaaagaggaggggagagaactgacctatggccctgggtccgttgcctccattcagttgttgagggtctgaagcaaattgacatgcccagggtcacgtgggaagtaagttggtcagggccaaccagggcttccttcctcccagtcctctgcttctcccagataccagaccattgttgctccatctccctaactcctcattgtcctcccagcacagcacctgtcccacgagaggttttattaatgtgtatcatactcccctagtgctcacactatctctgaactcttatgggtccagaagaagcagttgcagaaaagaagctgtggcctccagtttgaggaagagtgggcagttgaggaactaaagaccaagagcaggcattgcttgtcccccagggttcttcaaagagggcatggccaccacagggacatcacaacctacggatggtgcataaacttgtcagaggaaagcagctggccgctggctgtgcagcactatagacgtgtctctgttgccagaagcttggataggcagagctgctttgaagcagtccctggtagggagagcagaggccggacgcaggaggcttgaggccttccccatggaatcataatggtggatcccaaagggaatgcccttgctggggctgccccactgtctgaaatgcaaagatggcccccctcagctgctgtgcttaaggggactgcctacacctaacttcaaggccaagtccaagattcacatctacataattacattccattactgtttaacagattagagtcagtaattcttatcctggggtattagagatgtggacatgaactgggttctaccctgagcttttagtccccagcctagacaccaggcaaaaagtaggtatgtgctggctcctatcatgtgaaattggctaaggaagcaagcaacttggtgtctttggacagggggctgctttttttaaattaaatttaatcttttttttgagcagtcgtggacatctggttgtgcatgtccctttaaggcgagtttgtcgtctccagaaaagcatgttgttctttctctctatcttccacaagtccttgattaaaacactgaaggagacagacaggctccttctgtcctttccctcaggcttgccatgtcctggcagattccctgggctcctgggaactgtctacccatctctgtctgctccttttgacccagatcttattacagatacagagagagcaaaccatttattgcagaacaggcccttcaccttcatgttctgtgtttatagaccacaaataggtagttaatagatatctcttaatacttgttctttctttttttggctttgggaatttggtacaggatatctgggtcctgtggaaagtgaaatgatgcgagaaaaagacaacagctgaaaatggaatcctcacttaggagcatgaaaaaagtagaaaagaagtcaaaccacaaattcttcaaattaatgggtgggaatgaagtgctgccactctaatggggtggcggggctgctgtttctgatggtgagcagcccctgcaaggctagagcctcagttatggggaatgggcatttacagcagctgaccactttttcttccttatccttcttcctcattcccacctgccttttttcccctgtttctttttttggggggtggtgtctggattttattttagggtatttctaatatgcttccttaacggtcgatccgtagtcctgtctggagacattgctgtgtaacttagcaaccagcgtatcatatattgccctcagttgtttcattagcctgaagatgtgaacatcaaaaaaatggacacacagttggacaaaagcgatcaggcttgcatgcaaaaacagtttctgtgatgattaagaaatggacctgaagaacagcattattttacagtaacatatccaaagtaagggtgtcctcatatctggagaaagagacagacacagacaaggatggagagggagtgagaagagacagagccagggaagatgctggagctgcctgccctccacagggcctgaacgcagaggatcggaagccttcctccctgtggacctcctgttgtccttgctaaaaaacaggaaggagaatagaattgggatttttgagtaggcataattcttcatttatctgactaagtagaaaagttggcataacgagaaaaacagatttcagagggaaacatatgacaatgacatttttctgtgccatcttattacccatccacatggaggctgaatcgatgagctagtaaagacacaaagacatcctatcgagatgcctgtgaatggcaggggctggtacagtctggaactgctggctatgagtaaatatgacagcagggctttggctggctttcactgggccacttgtcattctcctcgtacattgtgtgcagtcaggacatttccctgcagaaatgttctttctgctgcttttctcatcatttttgagaagctggcatgagttttgtttgcttcagactttatttattaccttgaaattcagaatatttattccaaatgtcatgtgtagtcttagaaaagtttagactgtgacgattctgaacttcattttgcatcagaattacttgggatcatagtaaaaatgcagcaaaccaggcccctgattcacgagctatggagggaaatccccagaaatctgcattctaacactcacccatggtgattctaaagcagatgggctgaagatcataggataaatgaaagattaaagactcattttccagagagggcatgtggcaatttcttggcactgtgagttgatagatacattctttgctttcatggaatccctttccctgtttgtggggggtattgcctcattgtttttttcttcctcacacactttatttcccataagttattggggtaacaggtggtatttggttacatgagtaagttctttagtggtgatttgtgagattttggtgtacacatcacccaagcagtatacactgcaccatatttgtagtttttttatccctcacccccctcccgctcttccccccaagtccccacagtccattgtatcattcttatgcctttgtgtcctcatagcttagctgccacatatcagtgaggacatacgatgtttgtttttgcattcctaatttacttagaataatagtctccaatctcatctggtcgctgaaaatgctgttaactcactcctttttatggctgtgtagtattccatcatatgtgtgtgtatatatatatatttatatatatatttttatatataccacagtttctttatccattcgttgatgatgggcatttgggttggttccatgattttgctattgtgaattgtgctgctataaacgtgcatgtgcaagtatctttttttgaataatgacttcttttcctctggctagatacccagtagtgggactgctggatcaaatggtagttctacttctggttctttaaggaatctccacactgtttccacagtggctatagtagtttacgttcccaccggaagtgtagaagtgttctctgtttaccacatccatgccaatatctactgttttttttatttttttgattatggccattcttgcaagagtaaagtgatatcgcattgtggttttgatttgcatttccctgatcattagggatgttgagcattttttcatatgtttcttggccatttttatatccttttttgagaattgtctattcatgttcttagcccactttttgatgggattttttttttcttactgatttgtttgaattcgttgtagattctggatatcaatcctttttcatatgtatagattgtgaagattttctcccactctgtgggttgtctgtttactctgctgactgttccctttgctgtgcaaaagctctttagtttaattaggtcccagctatttatctttgttttcattgcatttgcttttggcttcttggtcatgaaatccttgtctaagccaatgtctagaagggttcttccgatgttatctgctagaatttttatagtttcaggtcttacgtttaagtcctcaatccatcttgagttgatttttgtaaaaggtgagaaatgaggatccagtttcattctccgacatatggcttgccaattatcctagcatcatttgttgaaaagggtgttctctccccactttatgtttttgtttgctttgtcgaagatcagttggttataagtatttgggtttatttctgtgttctctattctgttccattggtctatgtgcctgtttttataccactaccatgctgttttggtgactatggccttatagtatagtttgaaatcaggtagtgtgatgcctccaggattatggctgcctctgttgagtcatgcaggttgtcagggaagtgggggaaggccggccgtgacaggcttcacccagctcccatgcaaactgaagggccagtctcactcccaccatacaaagttcggctacagatttccttctccctgtggagttataccccctgctccactggccaccctcccgttggatccctgtggtgccaggtggtaatggcctgctaggggacgcagcgagctcccaggacctttctgctgcttcctctaccctgtatttctctcccgtctctaaattggctcagctccaggtaaggtcggaaacttctcccgcaaagagaccttcagcttctttagtgggggtgtgttttcggagaagagggtctccctttcctacttccacagttggggcactcacagtatttggggtgtctcccgggtattgcaggagccagtctgcttccttcagagggtctgtgggtcctctcgggattactggtttgtccttgcagtctatctggagctaaaatccacaaagcgagcttccgcacgctactctgtccggagctgcaatctagtcctgcctcccgtccgccatgatgatccccttcccatttgccattttaaagccttagagccacgtctccccattgagttgaaatgccctggtgaggtagtagccctcacacactttttgtttgtttgtttgtttgtttgtttttgaaacggagtttcgctgttgttgcccaggctggagtgcagtggcgtgatctcggctcactgcaacctccaccttccagtttcaagcgattctcctgcctcagcctcctgagtagctgggattacaggcgcccgccaccacgcctggctaatttttttgtgtttttattagagaccgggtttcaccatgttgcccaggctgctctcgaactcctgacctcgtgacccaccggcctgggcctcccaaagtgctcggattacaggcgtgagccaccgcgcctggcccctcacacactctcatacgtcatttgatgcagtttcttctctggcctgagaaaagtgaccttgcctcagttaaatgctggttggattgaccctgataagacagagatgaccttgttgctcaccttgttgagggagaatatcagcatgaaacactttgtcagtgtctcaggcagaggtgaattcatcaggactccactagagatgcagtaccagtaggagatgtataggaactgactgcaaggaattacctcatgggattatgggagctggttaggaaaaccctaaatccacagggtgggctggaactctgagacacagactgaatctgctatctactgtccacaggtagaatttgttccttcaaggtaccctcggctctgttttattgttagtgttttgttttgttttgaagagacagggtcttgctctgttgcctaggctggagtgcagtagtgggatcatagatcactgcagccttaactttctgggctcaagcaatcatcccacctcagcctcccaagtagctgggaccacaggcataagccactatgcccagctaaacaactctgtttttaaggcctttcaatttattgaaacaagcccattgagattatctaggataatctctcttacttaaagtcaagtgattatagactttcatcacatatacaaaataccttacagcaacatctagattagtattcgcataactggaaactgtagcctagtgaagttaacacatcaaaaagggccacccagtaccacaccacccccagccccgccaaaaaaaaaaaaaaaaaaaaaaaggaaaagctatcacagaaagtaaagtcagaatttattgagaattggaagtttggtttagttgggtctttcaaagcatgcatgggtcatgatacaacagtttggattggtggaaactgcaggctttgaggcaagggattcaaagaaccttagggtacaaacagttgatgtttttcatttgagtttctgggtctttcagaaagttcctgtaatgagcagtcatgccatctgcctaggcaggagacttctggaagaataaagttatgccagtaaagacagaggaagcatacaaagtgctgttattgcagacattggaaggtgtgcgttctcagtaaccagctgagtgtgggggtgagggagatggtttctattctcagcccagaggctctggattcctttctcatgaagcgggccacatgacccttgttcccaaagcctgagccttgcatttctccttaggagaatatctgtggacagatatgccggccatattgcccagctggctcaagagagagatgacatgtttgctaacagcaaatcagagctggagtgccaccccttactcctgctcttccctcttcttaaatggtggaagatcagtctacctttcaagagtcccgtcttccttttcttcctgcatctccagctctaagcgaccacataggacttttctctgttccatgaagatgtcttgtcctttcatgcctcagagctttgagatgtgctgtttcctcttctcccctgggaaatcctgcctatgcccagagggccatcttgaatgtcatctcctctaaaagcctgtgctgcacaccctgttcttcccctctctctgcatcacacctatgtgctgatgcagtgctggtcacccccaggtctctgccatggtacagatgcagttattatatgtcagtttctgtcactgaccaattcccagcggacaggaattagtcctgtttaactttgtatctgccttggtgcctcatctgtggctggcatacagtagtttagctatttattcaacagatagtttttgagtgccggcatgtgccaggtcataggtgtccactcttctggatgggagtgatatagacataataaactatctgctctcatggaggtgacatcctaggggtgaggaagacagccaatgaacaaaaaagatgcataagtaaaagcacatagacagcacttattgatgctccgagggctgctccctctgaaacagactgaggactgaataggataaaaaaagtgggtgagagattccctgcctccaatacaaagcatgcttgtgagacagaattcctccttagacatgccggtcaacttacagaagaggtatgcatttgctaatatttgttatcctgctgggtagacgtttctgtccttggtgtaacatagattgtactattatttttatttattatttatgtatagggtctagctaaaaacaaataagggtctagcagtgtgctttttatgtgttttattttattttattttttgagacggagtctcgctccgtcacccaggctggagtgcagtggcgtaatctcggctcactgcaagctccgcctcccgggttcacgccattctcctgcctcagcctcccgagtagctgggactacaggcgcctgccaccacgcccggctaatttttttttgtatttttggtagagatggggtttcaccgtgttagccaggatggtctcgatctcctgacctcgtgatctgcctgcctgggcctcccaaagtgctgggattacaggcttgagccaccgtgcccggcctacgtgttatttttgtgcttaataataaacagcgaactctctctctctttctctctcttcctatctcatttctttttagcatttgcaatttgccaggctgttttaaggactttaaatggattatctcacttggtcctcagaacaacctaggaaataggcagtatcctcattttccatgggaggaagccggggacatgagaaagctgggaacatgaggacagccatgccacttgcaccaggttttcccgctcggaagtgaaatgtgtgtccagtctgggtggccccatcacttttaagctatgcactatgcctcctgtgtgggatttatgaaatcagaacaatgacaagcctctttctttcttaatgaagtttacatcccaagttaggcctttcagagccaaaggtgtcatcagcatatggtgaaaaagctgtaatccagttgactttctggatagaatatagtctcagaaacagtggtctaccattgcctttgtttctgagtttgctctgcctttctgtcaggaccttaacatttttaatgcatattttagtagttctacatatctccttttcatttaaagtacaagacactgatttaaaagcatgggggaaggaagggagagaagataaatgtaattgttgattgagaaggcacaggcagaaggtgctgttgtctctgggacagcagtaattgctctcattcttgagccagttggagtctagatgcagtgcctgcgtccgtttcctcttgttcttattcacctctaacagtgcattgttcttcccacttttgggaagagagtttaggtctgaggaattaagtagcttttactgagtccactcagctggtgagaagcagagcaggaattgagcccagctttatcagagaatttaatcatgctttgctttgaaacaaacaatcatcaagaccctttcttgaaagcaatcttgcttgggttccaaaaaagaaggagtgaaccttgaaggagtgcctgagggagcctagaggccaatgcggaacttttccagccctcctcccacccagcacccagtacatcaccttgggtgtggcagggaagccctgggactccgaggagcattccttagcagttaggaatccagtcttgattatttgctgtcatgtatgttgagcgactgatgaactcttcctctgagggtaaatgcaaggcctggctcttacctttgtcaggcagacagagcacagcatttgttgtcagactacctgggtttgagtcctctcatcctcctccatgatgttgggcaaataacttatcctctcagcagctttgctttcttatctttaacgtgggcatagagttataatgttggttacataagcatgagaaacaaaaactccgagcccagttcctttcaataaatgttagtttattgcttttgttaggaatgtctcattgcagctccaaatttccatgattattagaaagattatttctgggccaggtgtggtggcttatgcctataatcccaacactttgggaggctgagatgggcagatcacaaggtcaggagtttgagaccagcctggccaatatggtgaaacctcgcctctactaaaaatacaaaaattagccgggcttggtgacaggctcctgtaatcccagctactcggaaggctgaggcaggagaatcgcttgaacctgggaggtggaggttacagtgagcccagatcgtgccactgcactccagcctaggtgacagaacgagactccttctgggaaaaaaaaaattgtttctaaaccctcctggccgcttcatacccttggggccttcttcccttcctgtttggaaaatttgggaagaataaactagacctctttcctcttgggaagggacctgccttaagtcttacatgaacaggtgtgcctggcccaagggttcagtcagcacgtctgctggctcactctgagcgttgttctccataatcactaatataaaggatttttagttctccatcttattttctcaagttgtttagagcttgagcaaagaaagggtatgttatgtatttggcttccttagaactctgttgttagtatttgccatcttcctttcatttctcacagagtcatagaattttagagttgaaaagagattttaaaaatgacttgaattcatttccccagctcctatctcagcctgcctgccaagaggcattcagtaccatgtttgcatgcttctagtaacaatgagctagctctctccggaggtgacccagtgcatcaggggatgctctacactgggctgaattgcacacatagggcctggatctggtggtgttgggttttcgggcctgcctgcacttggtgtgaaatgttcagatctgcttttctttgggaagaaatactggcctgaaggctgcccctttttgggtggttcttttagaaaattcattgtccaaaaaatcgtcagaattggctgaggaagcaagcaatcttatatgtctttggcatttcatcaagaaatttcccaccacctcagtgtgtctgctgagtcctgagcaaactccagcttgtggctcgtcttaaattatgcagggtagtgatcctgaaggcagatttattaacccccaacttcagcataccaggtagggcatgcgaccacggtgagtcctggaaggcctcctcctggaaattgggtgtggtgtgtactctgctggaagaaaataaaaccaccaatgaaattctatcttcaatgtcaaagatgctgtattagtctgttcttacactgctataaacaactacctgagactaggtaatttataaagaaaagagggtttaattgactcacagttccgcatggctggagaggcctcaaaaaacttaacaatcatggcagaaaggtaagcaggcatgtcttacatggcagcaggtgagagagggtgtgaaagaagcaaaggggaaagagccccttataaaaccatcagatctcgtgagaactcactcactctcacgagaatggcatgggggaaactgcccctattatccagttgccttccccaaggtccctctgttaacacatggggattacaattgaagatgagagtttggtggggacacaaagccaaaccacaccagatgctaagtgatagcttcataacacttacttcaaatatacttgccaaatggaggcagactgattggagagctgcttatttatgctgtttgtgcttaacttcaaggcaacatgcaaaaggaatcagcaaatgttaagaaaccaaactccttaataacccttttaaagaaacagctttactgagacagacgtcacaatgattcaccttttaaaggtgtccaatttgggggtatttagtgcattcacaatgttgtgcagccatcaccaatctagttccaaaacatttacatcaccccaaaagaaaacactggacccatggagcagtcattcccattccctccctcccccagccttaggcaaccatttatcctaatggctgattctatttatttgcctatcctggacatttcatgcaaatgcagtcatataacatgaagcctttgtgtctggcatctttcacttagtgtaatgttttcaaggttcatccatgttatagcatgtattggtacttaattcctttttttttttttttcctttaagacggagtttcactcttgttgcctaggctggaatgtagtggtgctatctcagctcactgcaacctctgcctcctggattcaagcaattctcctgtctcagccttctgagtagctgggattacaggcgcctgccactatgcctggctaattttttctttttgtatttttattagagacggggtttcgccatactggccaagctggtctcaaactcctgacctcaggtgatccacctgcttcggccttccaaagtgctgggattacaggtgtgagccaccacgcctggcccttcattccttttttatgacttactaattttctgtggaacggatagaccacattttgcttatccatttatcaagtaatggacatatgtattgtttctacgttttggctattatagataatgtttctgtgaacattagtgcacaaatttttgtgtggacatatgctttcacttcccttgagtaaatatgtaggagtgcaatcgtaggagtcaggaattgtagaaatgtaggagtcaggtcatatgcccttaataaccttttaaaattactttttttgtttgctatacttgggacccatattccttttctttgggtttgtattcacttcctttgtactgaatattgtcagatagaaagttaacagcctttatagaaataattaaaaattattcaagtgagaataaactgaatgcctgttatatctgctagattatatttgcctttgttctcttctttaccaagcttctacttgaaaatttacaaagattttttcttcttttccagaaccgcaatgagataaaaaatggcactatccttcgattaaccacatctccagtaagttgatcttagcttctgacttccagcaaactctttgctctgcgtttctgctatatgtgattgtgggatattaatttttgaggttgactttagtgcaaagcaaaaggcttccagaatgtcctgacatgcagattctggattagcaggaatgcccctccgtagatttcccactgcagaggaggaagaccttattccaggcgaagggcaagcttgtctaacctgcggcccaggatagctttgaattcacaaattcgtaaactttctcaaaacattatgagttgttctgtattttatttagttcatcagctatcgttagcgtattttatgtgtggcccaagacattcttcttcttcctgtggcccagggaagccaaaagattggacacttctgctttaagatttgagtttggaggtcatcttaacaacttctgtgttacagctgggatcactcacctgtaccaattggttttacccacctactcacacatccacctaatgccatctgagcaaattcagacaacaaacaaagcaaacaaaaccaaagtcagttactttcctttaaagtcggttactttcctttaaagtcagtgtggctgggcgcggtggctcatgcctgtaatcccagcactttgggaggccgaggcaggtggatcaggaggtcaggagatcaagaccatcttggctaacacagtgaaaccctgtctctactaaaaatacaaaaaattagccgggcgtggtggtggacgcctgtagtcccagctactcgggaggctaaggcaggagaatggcgtgaaacctaataggtggagcttgcagtgagcagaggtagtgccactgcactccagcctgggtgagagagtgagactccatctcaaaaaaaaaaagaaaaaaaagaaaaagtcagtgtgtgtgtgtgtgtgtgtgtctgtgtgtgtgtgtgtgtgtgtgagagagagagagagtttaagtattttgtagctttaatgggttattatgacaattcataaaaataatttagaaatattgaccacttcactgatccattgacagctgattctacataagaactttagagtcttctgaattaaagctgctaaacaagacgctacagtatatttagactattgtagctgatgatgtctctcttcttggtctttcctacttgcttggagatactttaggtagtaacattagcatatttaactatattattttacagtgcatttcattgctttcctaaaaaattatctgccccaaatacaccaagtgttactattttcactctgcatatgtgatgaaaactgtgtctaactatcattttcagtttccactgaagccatgtggtagactaaaaataaatttaaaaattgggaaaagcatctggctaaaattaagctgtgggtactgtaactaccataaatccttattgttgaaaattacattagtgtggcttagaaactcctaaacattttgcccaataacatcctgaacctaaaaacagtgatgagctcaatggagtgagttgctacagttggctgaactgtctttgatgcctgctttgctacttaatggagattataatctactcatttttcagtggctacatgatgagctgaggcgttttcgtctgactttgcattggtcttcttactcaagtcagcatgaatgaatgttaatttgacctttacaccattgttttatgtgttttttgtagtttctgattatcctgctaaaagtcatcatctgcttgctggacagaaaaagtagaccttgccttttatttcattttagagtctaaaagacagctttttaatcaaagccttctctaagccaaagaaggagttagtttcatttttttactgctgtggatttatgaacaaaaattccgcaatctaagtcactccttgagagaaggcttagatgttaggcagagtgaagtttttcagcatcccaaaagaaacttagcgtgacttgtcatcaggaagaatggaatttgtgttcttgagataatgatcctcacattcccagctcagtgaatggaaagatgtgaaagccagtgtaagaggcactattaaaagatgggagcagccgggtgcagtggctcacgcctgtaatcccagcactttgggaggccgaggcaggcggatcaccaggtcaggagatcaagaccatcctggctaacacggtgtaaaccccgtctctactaaaaatacaaaaaaaattagccaggcgtggtggcaggcgcctgtagtcccagctactcgggaggctgacgcaggagaatggcgtgaacccaggaggtggagcttacagtgagcagagatgacgccactgcactccagcctgggcaacagagtgagactatgtctctgtctcaaaaaaaaaaaaaaaaaaaaaaagataggagcccagctacaaaagactggcttacattttccaaaaagcagtgatccccaaacctggatcagctgtggaagtttgaaaatgctgatgtctggggccttaatagagaggctggattacaatatttgggaataggccccaggaatctgcattttaagcaatcaccttgtggtttggctgtagccacagggtctagaattgagaagttactctataagccagaaatttgggatctgtgaactttaaataggttattttttatagttttgcatgtagctgaaaaatatacttgcatatgcttgttcatttttacatacacaataaaaatatgttaaaaacaacaacacctattagagtaccataaagaagccagcagatggtgttatactagctttcgaagttccttcgtctgcctcagctgaactctccctgaagccaaataaggacatctcaacatccacatgggcacacacacgcctgcgcgtgcacacacacacactgctgtttttatgtaacgtgtagctatgctgagttttacctccactctgtcaaaggtggtctttttgttgattgatgaatttgttttctgtctccctttatcacagaacagtcccttctggattgatcctagagaaatggtcactaatactagaagatctaaacaaacaacctgcactgtttaattcatttgtaataggccttgtacatggctgctgcttctccactgcatggtacatctttagacagtctctctagtggccgtgttaaacaagcgtatctttctagtgtggtatctttatctatctcctgctaccataaaaaatataggctgggtgtggtggctcacacctgtaaacccagcactttgggaggccaaggcgggtagatcacgaggtcaggagttcaagaccagcctggccaagatgacaaaaaccccatcactactaaaaatacaaaaattagccgagaatggtggtgggcacctgtaatcccagcttctcggcaggctgaggcagagaattgcttgaacccaggaggcggaggttacagtgagctgagatcatgccactgcactccagcctgggcgacagagcgagagcctgtctcacaaaaaaatatagccaggaacacacccagagaatgtgtgcaaatgtgtgtgacctttggagcagtcaggatttggggagcttctatatgcagagctgagtagtgtcttgtagtgtctcctacctgccatgatcataatagctgtgggcatagagtctgaggtcctctgttgcatgcagcatattttaaaatcagctttggctattgttcgtatcagaaacagcttggcttgccagaccattgttacttttctgaaatttttgttttaagaagtgcttatggtgactatatttgtagtcttgaagtagagagaaacttctaagtagaacacaaaatgcagaaaccataaagaaaaagatcaataaatttgactaccaaaaaattaaaacaaccccacaaaaactttgtgtttggaaagaattccagaaacaaagtcaaaaacaacattggaaaaaataattgacagctgcataatggaggtccggttcattcatttgcaagattttttatgagtggatcaagaaaccgtcccaaaagacaggctgccaaaagctatgaacaagggaaaaataaacaaaataatgtctgtgcatgtatgtgtgtatgtatctatctgagaagaagttcaatctctcttagagatgaaaatctacagtcctagataatctaagtgtgaggaaaagatgctgtggggtcaggattttgaaaatttgaagtagaatctatttgtatgccctcttcgggggcaatctagtggtattcacctaagtttaaaatacatatacctttgtcttaacagtactgctgctgggaatttatataataaatagactcacaaaagcactgcaggatgaacacacacacacacgcgtgcgcgcgcccaagcatggctatatgcatcattgtttttagtgatcaaaaactaggaacctgttatgtatctatcagttggactaggtaagtgcagtaggtaatttttatgttgtagaatactgtgcagttgttagtaagaatgtgatacgtgctgccgaggaggtatccctaaagtatgccattaacacaaaagcaggttgcagaacatcctgtatagagggatgcctgttatgtatgtggaagggaagtgtatgtatattcagataaaaggataaaatgtttctcaagggatacccacaagaaactgttacctttgggctaactttatttttttatttggtaacttccagtagtactcgtgtgtgtgtgtgtgtgtgtgtgtgtgtgtgtgtgtgtgtgtgtgtgtgtatatatacatattttttttttttttttagatggagtcttgctctgtcgcccaggctggagtatagtggcacaatttcagctcactaaaatctccgcctcctgggttcaagtgattctcctgcctcagcctcccgagtagctgggactacaggcgtacgccatcatgcccggctaatttttgtatttttagtagagatggggtttccccatgttggcaaggctggtctcgaattcttgacctcaagttatctgctcgcctcaacctcccaaagtgctgggattacaggtgtgagccaccatgcctggctgtactcatgtatttctacctatctcatgtgctggtattatttttaattaaagaaatacacaaatatatattacaaagccattatagtacaaaagaggtgaatcataatgccctatgctaaaaacatgtcaagattgcaaactatgagatttttttgtgaaccctattataagcgaactgaattattgaccattatgccttcttttggcctgtgtggatgtattatagaaagcagaactgctcatcaagtccctactgttgctttgtcagctgtaagcataatccttgctttctactctttctggtttagggagccggtatcagcattatttaggtcagagggcctgtcatcatgatttttgggtcttattccctctggcaataagaaaaatagtattatctcagtcattgtgtggattcaggttatcggagattcttaacaataagcccattaatttttttttttaattccatttttcaattcaggttttcaatttttctctcctggtttgagaaactaataaagggttgtaacatgccttaaattctatttattggcatcactctcagcggcctagcttatgggagaagaagccagtggaggctggcaggcagaggcgacacaggatccccaggctgctgcccaaggacagattgcaggggcggccagggcaccgggtcagagtttcttgcaggttcaggagatgcagggggcttgggctacctgccttgtagggaattggagagttggaaggagtgtcgtggagggcaagccccagaacttcagcatgtggtgctctttgaggaaggatgtcctgttcctcccggtgctctggcaaaattaactgcgtgctgttaactaggaagcctggacagatgcaggtgtgccagccacccccatggaaatggcatttaaagctgtgggctggaagaggtcaccatggggaaagtagaggagagggctcagcacagacccctggggacactcttaaggtttagaggaggagcctagcaagaagccaggtgagcaaagtgtttcaaggaggagggagtagtacttaggtgtgttggaggctgtccaggtaataaagatgatgcgatgagggtggtccctgggctgccacctggaggtattaatagcatggtggagacactctccatgcagggctggacagggacgcctcatgagagcggggagaataggaggtagaacggaggcaacactttcgagctactctctcttccaaaacttttgctgaaaatgcaagcagagaaatgaggaagtagctgtagggaaactgggtcaatggatgtttttacctttctgtttattttttttaaagatgggagatattagagatttttgcagctggaaatgttctactacagagagagaattgatgatacagaagaaagggagataaatttgaagtaaaatacttgagaaggccaggggagaggagatccagagctgaggggaagagctgacttctgataggaaacagggtccccgccacacagcatctatcaggaggaagcagagcttgagggtagagatgccagcagctggtgctgttagaagtaggaagatgaaggaactcctggctgattgctttgatttcctcaattaaatgatcaccagtggaggggaggcagcagaaaggcatagagggggtttaaggagagtagaaaaggtatggaggagtcattctgaagggacacagcaaacattccaggaaaatattggattgctgggcaacattgagcgtacatttgaagatatctattaaactgttgaaactaaggatgtttttagactactttttaattggcatcatggatccagagttatgctagaagtttcttggggatgattttaacttgtatcttcaagagagagaaatgttaaatgcttgacacacacacactaccagtaccctttcctgtgcccacggctaatcctttatgagctgtttcctcccttggagtctggagtctgggtccagaaccctttcctatctgggacatgaggtagccacatcaagctgtttcaatggcccaaagtaaaacttttttctatccttagagcaataccagaaaatataacttgctgtctgatacagagacctacatgactattagattcttttcatgtgtgctggttgcttgaaaaatcagaaccaaggctatcttatttttttaataatgttgactctttcctcccaaatataaaaatggtgcaaattcattatggaaaatgcaaaaaataaggcttcctgcaaagaaaattgtttagaatattacaattcataaataaccacaggtcacatctacttgccttctttgaccatttgtatgcaaatgtgtgaatacatatgtgtgcatacatgaatgtatatatattcatttataggttcatatatatattcatttatgcattcatatatatatgtgtattcatttgtacattcatttagtgaaatgtgttttgaactcatggtaaatgccagacacacttctgtgtgctgggtgacattacattctggcagatacacacactccactgcgcatattcccacctcccataaacaataaaatatgtttgcgtcttggctgtttctcttaatattgcctcgtgaggatgttctcacactattttacattctctaaaagttccatatgtagttctatatgatatttcatcctatgactatgtcatgactatttcaccattgtcctattggtaaacacgatggttgctcaatgtttggctatgaatgctgttttaagggctccaaatgtaccacacatccatctccgatatttacatgcatccattcagggaagcacatcaccaccagggactccttcagctctgcatgctcatgaacaccctaggctaccttgtctactgcttccacatcctcacttccctccacaccccctggcctgcagaccccagacacatcagtcctctcctttctctccctccagacaggccaggcttgttccacctgaatcagggctttggcactaaccattgatgctgcccagaatattccactccccaatgtggtggggtccttcttgtcagtcagatctctccttgaatgtcacttccttaggttgcttgtccctgaaaaccactccatctaaagaagccatcagtcactctctaacacaaaccctccactttaggttttgctatgaaacatcaatatttgattttttattgctaattttaaaagttgtccacctgccacaccaaggtgggtgagccccaggaggttgagaaccgtagctgtcttatttgttgctgtatcccaaatgtgcggaacaaatgtcaagcttttcagaagtatttgttgaatcagtgaatgaggatgctgaggattttgaaggaacattcctttccactggataactggaaagacttgtctgagaatacatatatttatatatataaaatatataaaattatataaagagtgatctgcaataactgatatctgagaacaaaatttccttacaaaactccaatcttttcagaataaaaactttgattcccactttttttatataataaatgttgtatttccagattatttagaaattagagaagataaaaagaaggtatatccctgcctgttctggatccaattggaaaaatattgcattaaaagggtcccaccagtttgacataatattttgattggaggtcacttctgggactcacctctgtggagcaccttttcctggcggactccatgatgagggttactgcccagctgagatgcactctgtcacactgtgggtggaagggaaccttaaacatgatctcatcacagttccttggtgtacctactgatggggaaaatgaggccaagagaggtgaagagagaagttcactgcagccctggaggtagccaatggcagagatgtaagtagccctgccttggactcctgggtcatggaggtttccatcatggtcccctcgccacctggcttgccacagtcctcccctcctctttagtgatgtgtctcctccagttgttcacctatgtcctaggatgaagagggaaatttaccctaaagcaaacactgtgggaactgcactttttaaagaaaagttgtctccttagatacgggtaccaagggaaggagcaaggcctgtggggatagttaagaacagcctcatgccaacagaacacatcattctcaggcgctggggtgagtgaaggagaggggtgaatagttctgtaggaactttccaggccattgagtctatgagcttttttgtagtttgacaatttggagaaggctttactgctattactgggagtgactccttggctaagatcccagcaagttaggatattgctttgctattcttacatgtgaccatcttggtaaaatattttcaatttctatagcagcaacccatgagcagttgtgggatttgggaggactccacagtcttgattcctctgcttgggacatttgtccttttcaggtttctgttgtttctctcctcacttcttttattttaaaatttatttatttacttttaagtaggtaagtatgaaggcatgtaaatgaattaggaagaatagatataataaagtatatattaataagagtaggtataataaattccatctacttagcttccacattattgactttttctttgttttcttagcaaaggttcttccttaaaggtgcacagcttttaaaagggcaagcacattttctttaggtactgtaaaccaggagggcctccttgtgttacagctggggaagatcaggtggtagttgaaaaacacaatcagctgggcgtggtggctcacgcctgtaatcccagcactttgggaggccgaggcaggctgatcacctgaggtcaggaattcaagaccagcctggccaacatggtgaaaccctgtgtctactaaaaattgaaaaattagccaggcatggtgcaagaacttgtaattccagctacttgggacgctgagacaggagaatcgcttgaatctgggaggcggaggttgcagtgagtcgagattgtgccactgcactccagcctgggtgacagagcaagactccctaaaaaaaaaagaaagaaagaaaaacacaatcagagctgctcattctatcatcacggagagatgcagcatcctgagtgatttagagtggtggtcctcagcgtgtgattcccaggccagcagcagcaacacttaggggcttgttaaacacaaaacttttgggaccccaccccagacctttagaaccagaaactctaggggtggcccttggtctgtgtattaagaagtcatccaggtgattcttacacaggcaacaatttgagatccactgtttacaatgtgttttctggagtccagctgcccagtttctattttagcctcagcactgataagctgtgtgaccttgggcaagttacctaacttccctgaacttcaatttcctttgtcaaataaagcctatgataggacctacctgttgggactattgtggagattaaatgaattactttatgaggtatttagaatagtggcttataaaaagtgctaggaaacttggctattttttatattggtatcaactgcatcaaacactattagcattaataatgacaatgaaataatttttgggtactcattattgtcataacctatatagtaaatgcaaacatccttcttggagaaaaaatacacttttcaaggaatttgaaatgatttgcttgggttaactattaaatgttcatgtgaatgctgtatatccatttgaaaattttggaaagtactatatccctgaacaattttaagagataaataattctcacccagctctccactctcccttttaatatttgagtgatgtgtgggttatctgtagatcagtgaatagataagtagggagggctctcgttttcctccctgctcttttccttcttttctaatttctgatgcaacgtgtctgtttttggttttaattaaatgggagacctgccacatctgtgaccaagtgatcggggcatgggttctatccctgtctcgggtcctaaagaattgcatcagttcccctgttgaatccttttctcttcttgagggctgcttccaggtgacagtggagggagaactgggcagggagggagggctctgtggctgtggacctgctggggtggagtctttctgctcttaggacctgcatggattccctcccctattccaggcagagtctgtggccagcactggttttgccttcgatacctaggtggttctcctgcctccactctgcaaccttaaccctgtgatagttcacagggggttcctgagagagttgtaaccagttgtctgttgaggagagatacctcattaatggggtcgacaccctatcttctccctctctaaaatataacacggtttcaaaagagaaagcaagtacccgagaaggagaatatgatgatagcagagtgcttcaaccacagtgattttgagttaacttggttatctgtattaagcaaaaacacaggcagaacattttattcctttgtttttcttactgcctgcctcaagtgaaaggtagatatgaaaaccttgacttgatgaataaaacatctggactacaaattattacccagaagttcagcttctctaatatatttcgattcctctctgtcctgcatgtagaagccaagtgcaaatgccttaaaagtaattctaggcatagctgttaatttggtttcctaattatttagttttacattcacacaagtagccaatgcatgtgaaacaacatgttgttgaaaattgaaatttacaagcatcgttgtggagtgctggaagatttgcagtaacctagaaagatcatttgggtggctaatgaagctcccgaacatgtgtaggcagttattactcagagtattgactgaacgggtgagcgtgctgtataaatttgtgtaattgcttaactaagcaaatagctttcagttgcttttacataataattttacttaaagggtaaatacttcccctttcctccctcctttctgccgcatcctgttcagtttctagggctttaatattcttgtactcttgctcttgcttttcctcgaaatggaaatccaactcctttgagaagaatgcaactgcttcctgttgtgacatgagcagacctcgctctgaaggtggagtgtttgggttggaagccttgaagcctgtcgttgagatgcccactctgtaatatgcagatagtcttgcgcttttggcttttgtatctctgttcctcattgaaacataaatctgttttgctgttgtggtttcgtttgtcaacactcttccctttgcttttgccccataaggctcagaacgcccagcagctccatgaacgaatccagtcctcgagtatggatgccaagctggaagccctgaaggacttggccagcctctcccgggatgtcacgtttgcccaggagtttataaacctggacggtatctctctcctcacgcagatggtggagagcggcactgagtaagcgtcttttttcctaacttccacagctgtcctgcgtgtctccgcgttttgaatattgttacatgccttacacttgcaaactctgttttaaagaccagagccttggttagactcaggaaaaaaatagtttttaagatagtggcgaggcagtgggtttgtaatttcaagagttctccatcctttgcccaccaccatctagtatctgagacaaaatagaaatccatcaagtgctagaaatttcaggtttatgtgggaaaatatcatgccattatctcagagggccttggcaacaatgaaagtataactcgacaaaacaatagtccctcatattcgttgcctatccctaagaaaaattttccctcccttaatccattaaaaaattagattacctaattatgtttcttttttcattgacagctcaagctagttcaagttatgtttcaaagtataaaaccaggtcaagatataatccctgaagtaattttaaaacttaacacttgaatgattaaatacttgtcattaattacttgaaattaaatgcagtcaacatgtattaactacctactcagtgcatgcaaaagagttgaacaaaggaaaattttttcttacgagcttgccttccagaaattgatggagactatcatatgggcagaattctattgcgtgtaattcctcctgagagccaggaatctagagggcggacccattatctctctctctctctcttatttttttttatttgagatggagtctttgttgcttaggctggagtgcagtggtgcaatcgctgttcactgcaacctccacctcctgggttcaagtgatcctcccacctcagcctcctgagtagctgggatttcaggcatgtgccaccacacccagctagttttttttttgttttttgtttttggtagatggagtctcactctgtcgccaggctggagtgtagtgggacgatctcggttcactgcaagctctgcctcctgggttcaagcaattctccttcctcaggctcccgagtagctaggactacaagcgtatgccaccacacctagctaatttttgtatttttagtagagatggggtttcaccatgtcagccaggatggtctcgatctcttgacctcgtgatctgcctgccttggcctcccaaggtgttgggattacaggcgtgagtcaccacgcccggcctaatttttgtatttttagtagagatggggttttaccacgttggccaggctggtctcgaactcctaacctcaaatgatctgcctgcctctgcctcccaaagtgctgggactacaggcgtgtgacaccacatgcagctaatttttgtgtttttagtagagacagggtttcaccatgtcagccagatggtctcgatctcttgacctcgtgatccgcccacctcggtctcccaagatattgggattacaggtgtgagccaccgtgtccagcctgatttttgtatttttagtagagatggggtttcaccacgttggccaggctggtcttgaactcctgacctgaagtggtccacctgcctctgcctcccagaagtgctgggacttgggactacaggcgtgtgacaccacacccagctaatttttgtatttttagtagagacagggtttcaccatgtcagccaggatggtctcgatctcttgacctcgtgatctgcccatttcggcttcccaaagtgttgggattacaggcgtgagccaccgtgcctggcctaatttttgtatttttagtagagacggggtttcaccacgttggccaggccagtctcaaactcctgacctcaagtgatccacctgcctctgcctcccaaagtgctgggattacaggcatgagccaccatgcctggctggaacccattaaatctcagcctcacagaggagatgagtgtgaactgtccttgagggagttggagttccatcatgagggaggaaggaatgtcccttcctgccggggagcttgctctctggtgtgactgtggagcgtcaggagccaggcggggccagctcttatgttggtggagagacaactcctttaaccactgaatgctgaatgcctgctaggatgagcaggaggctgcccctgccatgtggtcaggtgctattggcagagactagtagagcatacaatttaaagcatgtgaaattgctgaatcaattaattgcatatgaatatgctaagctaataaagtacagtgtcaggataggcatttattatgaaagagtaagtatcattgagaatggaggtttaaaactgggttgtttaaagggtacctagtaatacaaagaatgaattgataactctgcaagttagagatctttctgggcccctccccttctgtccccttcctctcctttccctccctcccttctcccttcccttcctcctcccttctcccttcccttcccttcccttcccttcccttcccttccccctgcccctctccctttcttccttcctttcttccttccctccttctcccttctctccctcccttccctttgtcctcctctcccctcccctcccttcccctctgccctcccctccccttttccctccccttttccctccctccctcctttccttccttccttccttccttcctttcttccttctttccttccttccttccttcctccttctcctccctccatcctccctccctcctacacttggcatcatctggcctctgcagttggtactagtgaaaacattttttttctcattcaaagacaagatattctttagagtttggagttggggatcttaactcgcagtcaagtagagaaaatccctagaactgaatgtgaagaacatcatgtcagagaagaccgacaaacaggcctgggtgatcgggaaagggtcaactgtagacaggtatcatttatttttttcaaggatgacgaaacctctgcttatgaaagtttgggcatacctcaacgtggagtggtacagggaaatgtaaaccctggatgttgtcagaatccagtgtggttactgtaagctggagctggagcttgaatcagcgagagggaagttgaaaaagtttagggatccaaggagcttgacaaaggaatggatacagagggtcctgtctgtgaggggagctccaggctggaagctggtctggaatgtgtcaggatcctattgcctgtttctggggagcagaggaggaggacgagttgttataaacaccttcactcatcactggattacttcatgtacctgccagacatggtagcctatactacataccccccacggcttctggtgagagagtggggcctgggggaggctgcctcggcaacactaacatgttaaataaaaatgtaaaaatgtttacccctgtttattgattaagctaagtcaaggacaatgcatcagagccagttgtaatgtcacctgctgatatgagttggttctgccacaagtacctaggtatccagggcttgagctctggcacattcagaatgatatttgcaaatacttctgaaattattagaattgcaattgtaattacggttactttaccgtggtaaagacagcaaagcaggggcgcatgtgatctgcattctgaacaggggcctgtggtggagcccctcacctccagaggccggcagttacagacttcgacaatgaaactgcctgctaggagcttttgttttcagtttctcattgctttactttgctagggctgccataacaaaataccacagactgagtggcataaacaacagaaactttatttttcctcagagttctggaagctgcaagtccatgatcaaggtgttggcagggttggtttctgctgaggttgctctggatagtggatggctgccttctctctctgtcctcatgtgcacatccctgttttttctttttgtcttcaaatctccttttcttataaggacaagagtcagattggattagggacacctaatggcttcattttaaattaatcatctcttgagagggcttatctccaaatactgtcccattctgaggtactggggtttagggcttaaacatgtgaattatgaggggccacacttcagtccgtaatgcttataaaagggacacaatcatttttgctttaaaagaaaaagagtaagaactgatgctatgtatgtgccttgtcaacattcttactttttctcagtgctgtggccttactttatgacacatctccacctgcagaacagtccaaaagattcactattcctcagacccaggatgggggacagcaggtctgaattctgtctccatgttgcacacgtattatacaatgtgagagaatgtcaatattgaatgtactttatgtgagctaaagcaactgaatgcctttcttaaaaaaaggagtatcacactcattaatatcttaactacagtcacgcactgcataagaacatttcgatcagtgatggaccacaaatataatggtggtctcatgagattatgatggagctgccctatacagttgtgccattttttatattttataccatggttttactatacctcttctctgtttagatacacaaatatttgctattgtgttaccattgcgtacactactcagcctagtaacatgctgtacaggtttgtagcctagaagcaataagctgtgccacatagcctaggtgtgttgtaggctataccatgtatgtttgtgtaagtacactctacgatgttcacacaacagaatcacctaatgatgcatttcttagcatgtatcgcattgttaagcaacacatgactgtatttataataatcagtaagccgtcccagtttgatacatacagccaggtttcagacagataaacagagcttaaggccaggtgttgggtgaattctcttttgcatttgtctcttatactttcccatcacactatgttcgtgggaaggaatgatgtctctcagggtcatctttggtgtcccccttcctgttttatgtaaattcaaagttacgctattttcggggatggaggaaggagggactggagttgcaaggcctcctgccttccttctgctggtcctgcatctcatgctcagaggtggcttatttaataaacagcaaatttttcagatctttcgctaagattaaaaaggaaagagaaagccatttttctataagaaatcctggcttctctgttaaacttagagcaagacttcaattaattaacaggaaacctttgggatagaaaccacataaattaaatagatcctgtaatttggaaggcatttagtcatgactcctgggcaatgttccagctggagaaggtggtcgtttcctaagcaggacctgtggaaattttcgtaaacattgaagaaatgttgctggaatttttctccttacttttaggaataatgagattcagagatgacttgcccgcccctcattacccaaggctgggctttttgttttttttttttttttactttaagttcttggatacatgtgcagaacgtgcaggtttgctacataggtatacacatgccatggtggtttgctgaacccaaaacccgtcatctgcattaggtatttctcctaatgttatccctaccctagcctctcaccctctgacaggccctggtgtgtgatgttccccgccctgtgtctatgtgttctcattgttcaactcccgcttacaagtgagaacatgcggtgtttggttttccgctcttgtgttagtttgctgagaatgatggtttccagcttcatccatgtccctgcaaaggacatgaactcatccttttttatggctgcatagtattccatggtgtatatgtgccacattttctttatccagtctatcattgatggacatttgggttggttgcaagtctttgctattgtgcacagtgctgcaataaacatacgtgtgcatgtgtctttacagtagaatgacttataatcctttgtgtatatacccagtaatgggattgctgggtcaaatgttatttctgattctagatccttgaggaatcaccagactgtcttccacaatggttgaattaatttacactctcaccaacagtgtaaaagcgttcccatttctccacatcctcttcagcatctgttgtttcttgactttttaatgatcaccattctaactggcatgagatggtatctcattgtggttttgatttgcatttctctaatgaccagtgatgatgagctttttttcatgtgtttgttggccgcataaatgtcttcttttgagaagtgtctgttcatatgcttcacccactttttggtagggttgtttttttcttgtaaatttgtttaagttccttgtagattttggatattaaccctttgtcagatggctatattgcaaaatttttctcccattctgtaggttgcctgttcactctgatgatagtttcctttgctgtgcagaagctctttagtttaattagaccccatttgtctattttggcttttgttgcagttgcttttggggttttagtcatgaagcctttgcccacacctgcgtcctgaatggtattcctaggtattcttctagggtttttatggttttaggtcttacgtttaagtctttaatccatcttgagttaatttgtgtataaggtgtaaggaagtggcacagttttagttttctgcatatggctagccagttttcccagcaccatttattaaatagggaatcctttccccattgcttgtttttatcaggtttgtcaaagatcagatggttgtagatgtgtggcattatttctgaggtcttgttctgttccattggtctatatatctgttttggtaccagtactatggtgttctggttactgtagccttgtagtatagtttgaagtcaggtagcgtgatgcctccagctttgttctttttgcttaggaatgtctagattatatgggctcttttttagttccatatgaaattcgaagtagttttttctaattctgtgaagaaagtcaatggtagcttgatggggatagaatagaatctataaattactttgggcagtatggccattttcatgatattgattctttctatccatgagcatggaatgttttttcatttgtttgtgtcctctcttatttccttgagcagtagtttgtagttctccttgaagaggtccttcacatcccttttaagttctattcctaggtattatattctctttgtagcaattgtgaataggagttcacttatgatttggctctctgtttgcctattattggtgtataggaatgcctgtgatttttgcacattgattttgtatcctgagactttgctgaagttgcttatcagcttagggagattttgggctgagatgatggggttttctaattatacaatcatgtcatctgcaaacagagacaatttgacttactgtcttcctatttgaataccctttatttctttttcttgcctgattgccctggcctgaacttccaatactatgttgaataggagtgctgagagagggcatccttgtcttgtgcccgttttcaaagggaatgcttccagcttttgctcattcagtatgatattggctgtgggtttgtcataaatagctcttattattttgagatcttcataagtgaaggagaaataaaatcctttgcaggcaagcaaatggtgagagattttgtcacaacaaggctgggcttttaaaaggtctctctccagctggtactgggtggggccatggagcaaagtcagtaacagaggaacagtgaggaagtgtcatcttgacagagcatgagcacagtgtttaaaacctgagtttaattgttctatccttaatggagttttgaaatttcattcctaatttctgcttgaaacataggagtgaaagcaaatacagctgtggggaaacatgttgccccagcctgagcaacaaaaggaatattgaggaatggacagtgtttccagaaacaaatatcaaaaagatggatatcaaaacatttctcagaaatgatatattttattttatttgaaagaaggaaaattgtgtccacaactcttaagtccaatgtcataaaaaatactgctcttctttgggttttaataaaacaccacagtctttgtccatgcctctaagcacacagacaatgagaaagcctacttctgtgtccttccactgttagtcagtcatcactaggggcagaaaaacaggggaaacatttccaagaatgaaagggcagggtacttatagtttccttcccgcttggcaatgtgatgggaaaattacgctgctggaatatgagtaagctgtaacaccaccctgggcaggaaagtcaactgcgaacaaaagttaaattcatgtatttatgatgaacttggaaagtttctggttttttttttttttttttttgagacggagtcttgctttgtcacccaggctggagtgcaatggcgcaatcttggctcattgcaagctccgcctccccggttcatgccattctcctgcctcagcctccagagtagctgggactacaggcacctgccaccacacccggctaattttttgtgtttttagtagagacagggtttcaccatgttagccaggatggtcttgatctcctgacctcgtgatccacccgcctcggcctcccaaagtgcttggatggaaagtttttttaaattaactttcttttcttatgaaaaattatctgtcgtttgaaaagtatataaaaaagcagaaggaaaaaataagaataatttgtagtgtgcctttccacagacgactatttttaatatcttgatgaatatcgttttttatatattcttttagatacacacatatgcacaggctttataaaagtagaattataatactcatgtttttataacctgctttttgtacctaacaatatttccatgtgattaaatattattctcccctgtcatttttgttgcatgcgtactgtttcatttttgcagctttatagcttattatgtacaattaatatacaataatttgaagaatgtgcatagtacagtgaactatttccctattgtaggacatttatattgtttttagggtttttctctgaacttttattttattttatcttacttttttttgagtcagagtcttgctctgttgcctaggctggagtgcagtggcacaatcatagctcactgcagccttgacctccagggcttaagcagtcctcctgcctcagcctcctgagtaggtagggactacaggtgccaccacacctggctaatttttaaatattttttatagagacgaaggtctctctgtgtttcccaggctggtgttgaactcctggtctcaagtaatcctcctgccttggcctcccaaagtgctgggattataggtgtgagctaccgggcctggctttctgaatatttttaaatcagcttttcttttagcaaaatttttgtggatatttaatttattttgttggaataaaattcctgactcagagtatgtatacattttaaagctgttttaaaataagaatagcccaatagcttgcagaaatgttctaatttatactttaccattcttgtaggagtatgtctatttccaataccttggtcaatactcggctggttttctggttttcctcagaaagatagcagtggtatttgtggagttctcactaatctggggaatttataagtgctgttttatttgtttcattgaggtcatttctccaaaatctggctgtattaggaacattggaaggagtcccatagttattttagtgatatgtaaagttcttaggtaattgtcttaaaaagaaacattaagtgtataaattattagttcctccccactctgtcatacatatgacacagatggaaaagtctagtgctgtgtgtatgtatattacatgtatataaaaattgtcatcatttttgcattaatacaagaacagtcttgaaacaggttccctccatctcatattaacctttcgttattcaaattcttttcatcttgcctgaaccagaggtgttttcattttctgaatgttgtgaaaactgaggtatagcttgaattatacactttgttttgatgttccctagcacccacacttgagatggatttgtatgttttattgattcagcgaaatgtacgttactgagggctgaaccatactcctcacactgggttaggcatgtgagacgtaagaggaggtgcatggaggataacacaaagatgtatatgacagttttccattatgtgtgaccttttccggaattttgccttcacacaaaagatgaatttctgttttgaaactttgttaacctccaaggacacagatgatcagctctaacttatgctattgcctctgagaacttggtgtctcttagaagtcttggctgttctgggaggtccagtgcaggccaaagcgattcatctacttgctgccttgcagccaaggccagctgacaccatgcacgttttgcactttacctcctcagaggccacagacccagacagaaagaagctgctcctgtggtctctgcagtcaaccccagctgtgatggctgccacatcttcccaaggctttctgctgttttcttggagcctgcagtgcactctgcattgctcagggagctccagctggaacagctcttgagggctctcccagaaatttgcatcacaaaggccaaagaggccaaccttcttgggctttgtcagagattgtgtggcagaaaattccctaaacaggatctgccccctcctcactccttttgctttctctgtgcgtctttgtccttcactctggtaatggaaatgagaaagggtcacacagcccatttgaagaagagattatcttctgttggcgaaaaaaaaaatgccgttccttgggctgaggtgagaggtttctggccactgtgaaacatcaacctttccagagtaatttctcttctagtcacgtttctctaaaaaaataggtatattgagacacacacacacacacacacacatataaaatcccacttagggcaatagacagatgttgcaacaaaaatttctcttctccttatgcataatctgaagccaaagtgaggatgcaaatttgaggagtaagaagcactgtgactcagcactgagttatgtctgtgctctggtcagggagagctctccaaggtcagggatgctggaggaggcggaactcatataaaaaccataagcatgctcaggccccaggccagaaagttattttaaaagtttacagcaactactttatgtattacacacacacacacacacacacacacacacattttatttcaaaaccattttaaacttaaaacttgcaagaacagagcagaaaatcccctcttgctcttttcccagagaccccatttaagtttcacctgttgtcccagctctgtcctttaatggaaagaatctagctccaggtggcaccttgcacccaggtggcccgtctcctcctagtcccctctgatctggaattgttcttcactcgctccttttctttcatgactttggtgtttttaaattataggtcagccattttatagaataccctgtaatttgggtttgttaaagggtaatttgttaaaggtaattttcatggaaaagtaaaatcataactctcatacagatgtgaaaattgattatacaaattgggtaattcttgtcacactcaactaagtcacagttgaggagctgaggcagaaagcacatgggcacatggcacctgctccaagaatcgaattgtctgcaagtccagctgctaagatggcctggtgtaaccctaagaccagtttaatctagtagctgctgaaatgacctgctgtgactttaggactggttttacctaccactgtcactcaccaatcagagcttagcagctctcaaaaattctagtgcctataagctttctttcaaaaccgtaggtaacattcctatttctaataaaactcccaacctttcctttgttcctcagacataccaaagtctaccagtctatgtgtatgcttcaaattgcaattctatgattctccaataaaatgtttaatttagaggtttccctctatattacattttgacttcagatatacaaatatgtgttaaaataatttattttactcatatgatatgatgaaactaggcagatgttataactttaaagaaaaagtcaaaagagcacaaatttatatgaagcaaaggaatgttgagatgaattgcaaatgaagacacaactagttttccaccagtggaaaggaagtcaattaaatcactgccagacaggagatatagatagatagatagatagatagatagagatatatatagatagatatagacagatatatacagatatatatatagatagatatctatctatctatctgtctgtttatctatctatctatctgtctctccatcagttacctacatcttaacaaagcgttgtaaaataactcaaagccaacaggactagaatctgatagcccaaaaggatatgttgtaggcgctgcttagttttctactgaaacacaagattttgttttttacagatttatccagtgttctctcatcacaacaaacattacaacaaaaatttctctttatgaagacccatattgtatgtctttggctggaatataacagatggttgtgattttttttcccccatttcgtcctgttgatggcacatggtatctctttgttttattactggttataactttgaccacttcattaagatagcatcttccagatgtctccactataatactttctccctaccttagcagctaattcatgaaaagtttgtagggagacacagtgaaactatgtaaagcctcattaccccaatttcacccatcagttttggcattgacatttcttatctgaattaattattgctctgatgatttccaaaggaaaattttctaatactatgatttcttctacatgtattagttggttttctttggtagtaagagctctgttttttccctacgtatttattcacctacatgtttatctccagtggggagctcataccagctcctgagagccacttttgtacaactctgttctgctctgcgttcattgacctcatgttggttctttaagttggccatagtgagagtcgttacactgtggaaatcggaaaataatatcaagcagattcgtgtgtttttccccagagatctggtgtttcaacatcagcacatcactctataacaatgtggactaattcattcctgttttattcagtgggtttaatctatcactattattattgattttgatgctcagcgtgtccctgatgtggcctgtgggagctctttcaagctgacttctgtgtccttttgacctgtattgcgttatgttttgagcatttctttactttctggctcaacaagatgttccagaactatctagatctccttgccccacccctaatacgagccacttccccaaggagccctggttccttttagtggagagtagcctctggcccttgcgtgctgccaatttatgctcaggcctgcctccccgtctcaccctttcaccctgcccaatgcctttttgatgaaggaaggatgggaaatagtaaatattttttaaaagaaaggcaggtaaaggagggggagcagaagaggaataaaaatatctctttatatgcatttttaatccccctcccacaaattttaccagagactaaatttagtctttgcctggtgatttggatttctgaaatggttacattttatgtggttgagaatgtgaaaatttctgaagagcaaaatcgtttgtcaaccgtgtattcagtccctactctggatgtgcctcacattacgctattgtcacagtgcagagtcctagccctcaagcagctagaaggacagtgagatgtcctgaggcttatagctgatgtgtcctcagggcctgtggcctgcgatgcaggcaccatctatgctgtctgaggaagagaaatcagaagtcagagagacttcctagaggaccccagaatgagcctagaatgagatgagtttgggggtaggacttagcgagttgggcaaagaggggatggatgtttcataaagagggaagatcatacttaaagccagagagatttggcagacttgaggaatgagagatggtttggccagttttgaaacacttgtttcttcatattcttgagcctagtttttttaaaaaagcataagtatcctttattatagccagatttgcctattctaagccaccagcccagagttcagttttgggatttaacactagtgcaatgtcttattgcaaagagattgattgcagcatcttcccacagaagaagccacctgagagagaaaagagaaagtaaaattagtggacattctaccaaagaaagataataaaatatttctttatagtctagtggtttttgtctcaatgttttttcatttaaaatgtatcaattcctatccctatgggtaccccaccccgctccattgaacacagacccattctgatctaaatggacggttttggatgcctttactcataagcaaatgcaactggttaatgacagtagtttaatgctgatcttttgattgtttgtttctgatcattaaagaacaccagtttattactttgaatgatgtcttgaaatggataaaattcttttacttcatggcagttaaatctgtcctaaatctaatcctgagttttcttcaagatatgttctttgtgtaaaaattgttgcttttaagtatgctcctcacatggttgtttttaaattttgcaggcgataccagaaattgcagaagatcatgaagccttggtaagaatatttgatcgattgatattgatgatttaacccttcctactttcctgcataattgagccctgtcatctgactgattgtataactatgcatctagtattttgaataagtgattttttgttatttttgttttctatttgatgttcttttataaacaacttcttcaaaaatgtattttcccccctttttttgctttggagtagaaagaatattttatgtatgtaaccactaagtgatgctgtaaccacagaaagattgctaccctacttctggagcagtgctaagcataattttatgtattattttaaacaaaactaacttttatgtggcctgtgtgatgttcaaagtcaaaagtctttgattttcttcagtggcttagaaagaaaacggattcacatttttaaaagtatccaggattgaaggatgcaatgaaaattatttactttgagtctgagaaagtgctcgatcacctatctatgaagtgaattgtatgattgtgtctgaagatagaaaccttctttcttagagttttcccttctaagtttctttcttaaccattaaacagggtgagtccaaatatggttctaacaaactgtttgaagtaggccgaacagattttcatggtgccaagccattaagcagataatttcagtttgagaaggaacactgaccagcgtctcaaagtgtgaaccttattttgtaagctctcagagaaaatcctcatcaccttcaatgtactatagtattatgctggtctcaaatcattcacacacagaaaagtatgagttgcaggaattcttctgtttattaaattctaataaagtagaaagcaatattgagcttctagggtaaagcttcttaaatttcattttgatgtatttaatacagtagaagcacttaatggtaatgacagtagaagccactttttatgagactttatcctgggcattgtctcaatgtttacactcattactccaaatccacacttacattcaacatacaagctcggtatttccttggtgcagaagttaaaatcagatggaggagctgggattcaaacttactttctccccatctacttaacagaatttgcaaatatagaggaatttggggccctgaagccaaaataatttatttaaaatttattagacagtagttttaatcttttggtatgtagatatgctggacagtttgtagtgtagttcatgatttttattgataaatcatagacagaaatgaatagtcaaggccctggttctggtaatggcacagtagcacaatcagactaacacagataacaattatgaaatccggacaaaatattataaacaaaacatcttaaaccaactatatgaaggcactggatagcaacccaaaacaggcagaaggtagagggaagttaacccttgagagaccagatgggtctttgatgggatttgtatgtttgaagctttttctctgagaacacctactcatccaggcagcatggggtggcagagagcctcagtcttagtaagttactaagaagatgtagtttgggactgcagagcagctagctaattagagggaatctatgaaagacgagaagctcagagagtaggagactccacatccacatgtaaaccctgtcgcagtccactgctgatcactgaagtgcaaatgcacactttaatggtaaaaacagcaacttaaagatctgagcaaagatgtcagctgtcactcacttcagaatttagatttttacttcctgctagaacaaaaattatcactcttcagaggaacaaaactgatatctgaatattgacagtgttttgttcacaatatccagtatataataaaaatgtgctaggtatgtaaggaaataggaaaagacgacctatagttaagaaaaaatgtaggtagtaaaaactggccctgagatgacccagatgttggaattagcagatgaaggttttttaaaaacttttataaatatgttaaaaactaaagaaaagtatgagtgtaatgaatgcacagatggggagtcttaatagagaaattgaaaccataaaaataaccagatgtcagttataaaattgaaaagcacaataaagtgaaaattttactgtatgaggttgaagatgtcagaagaagagatagtagccttgaagatgtatcagtgtaagttacctaatctgaaaagttgataaaatgaataatgagtacttgacctgtgagataataagttatctgaaatacatttaattggagtcccaaaaggagaggaaaaagaatggggaaggcaaatatttgaggaaataattacagaagaaaataatgatggagatatatgaagcaagttcttcacactggagagacatgatagtagatagatactcagatctgtaggaaaatatgaagaacaacagaaactaaatatgtgggtaatataaaaagacaaaatgtagttttactttcctttaaatttctttaaaaggctgtaactatataaagcaaaaattataatactgtttggtagggtttatgacatatgttgatgcaatatgtatgacaatgagagcacaaaggatggaggtataagagcaactacactacagcaagcttcctagtgtataatcttccgtttaagtagacattaatatactaatggtgcacattgtaatacacagagtcacaactaaaaacagtgcaaggaagcataggccaaaacacaaaggagggattaaatcagactactaaaaaaatttgattaattcaaaagaaggtaaggaaagagaagtagaataaaatatagttaagacaaacagaaaacaagttggttgacttcaatctaatcatatcaatacattaaatgtaaatagactaagcagctcaatgaaaaggtttagattgtcagatgaaattttttaaaaagcatggcccagctctatgctgtttataagagatgtactataaagacaagggcacatgtacgttgaaaataaaaggatggaaaaacatataccatgcaaatgctaataataataaaactgaatggttttattatcaggaaagataagacttgaaagcaatatgttatcagagttaaagagggataattagtaataaaaatggtcgcctcattaagaagatttaatcctcctttttattttaaatgtgtatgcacctaaaaattttaaatgtgtatgcacatttaaaattattatacatgtgtataataaagttttaaaatacgtgaagcaaacactgactactaaggagaaaaagaggcaaacccatcagcatagttgatgattttaagaccagtctttcctaactggtatgaaaactaggcaaaatgttaaggatatagatgatttgatcaacactatcaaaggtcttgccttaattgtcatttataaagcatcagactcaataacagcaaaatatacattattttcaaatgcacatggaatgttcatcaaaatagtccatagtaaggctcaagaattttcaaatgattaaaattacacagattatgttctttgatcacaaggaaattaaattagaagtcggtaacaataaaatagccgaatagcctcggatgtttggaaattagaaaacactctttcatactatcaaagagtcaaggaataactcagttgaaattatgaaatattttaactgaatggtaatgaaaatacaacatacccaaatttgtgaatgcagctgaagctgtgcttagggggaaatttgtagcattaaatatctatgttgaaaaggaaggatggtttaaaaaaaaatggtctaagtttttacttaagaagctttaaaaaatgtgaattaagtagaaaaaaagaataataagaatactaaccaatgaaataggaaacaggcaaataatacagaaaattaaagccaaatatttattaggaaaaaaaagaaaagagaaatccaaatatcaacaccagggataaaagagggaatatcactacaaatcatactgacattagaaataaaataaaagaatattgcaaataattttacattaataaatttaatgttttagcacttggggaggccaaggcaggtggatcacttgagcccagcagttcaagaccagcctgggtaacatggcaaaaacctatctctacaacaaaattcaaaaattagctgggtgtgacgccttgtggctgtagtcccagctacttggtaggctgagttaggggattgcttgagctagggaggtggaggttgcagtgagccaagatcatgccactgcacttcagcctgggcaacagagtgagactctgtctcaaaaaaaaaaaagaaaaaaaaaaagaaagaaaattaaggatgaaatagacaaatgccatggaaaacagatttaccaaatgtgttagtcatggaaatgcatggctttgatctcctttcaggaagaacttgctagtcagccaagaagagtgcagttacctgatagttttcagttatcacatgttccagattcatagcagctttcagtactctccaaaggcagcatttagttattgaacatggtggggataccagagcctggtcatttctacccattatgggattcctctaagaggcactgtttattctgcagcgttccactgagttggctgagacattttcagatctgcatttgcttcttccccttcccttcgcaggcatcagatctgtttcatggtcccaaggctttccatactcaatcctgctttctgcctgctttatcttccacaggcattgcccaaactcgtactcaatctctgttctcataacttagtctcagcatctgcttcacagaggactaaaactgacacatcaaaactgactcatgatgaaatagaaaatttggacgcccatagttattaaaaaaattgaaattggctgggcgcggtggctcacgcctgtaatcccagcactttgggaggccaaggcaggtggatcacgaggtcaggaattcaagaccagcctggccaagatggtgaaaccctgtctctactaaaaatacaaaaaaattatccatgcatggtgacaggcacccgtaatcccagctacttgagagactgaggcagagaattgcttgaacccaggaggtggaggtttcagtgagccgacgtcgtgccactgcattccagcctgggcgacagagcgagactccatctcagaaaaaaaaaaattgaaatcatttctcgaaaaccttcatacaacaataacaggttacactggtgaattctatattatatattatagaagaaataccaaatctaaacacatgcttttggaaaatagaggagagggaccagttctcattattttatgataccagtatcactctgataccaaaacctggcaaagacaatacaggaaataaaaattatagaccagatgcaaaaatccacagaggcatgttaataaatacaatcaagcaatatgttaaagggataataccttgtgatcaataagagcttatctcagaaatagtttaacatttgaaaatcaatcaagcagctcagtgttttatgaaataaaggagaaaacctaaagagaaaaatcatcttaatggagagaaagcatttcataaaatctaatgtatattaataataaaaattctcagcaagctaggaatagagggaacttcctcatcttgataaagtaatctacaaaaactccatcatacttaatgttgaaagactgaatgttttctaccctacagactgagaataaggcaaatatgtttgctttctgcagttctgttcaacattgtataggatttcttagctattgcagtaagtcaataaagaaactaaaagcataatataagaaaggaagatgtaaaactacctctattcatagaaaacatgattatctatttagaaaattcttaggaatctacaaagaaactgctagatataattgaatttagcaaggtttcaggatacaatgtcaataaaataaaaatgaatttttatattttaacagcaaccattggaaaatgacattttaaaatttccacttataaagtatcaaaatcataatttgtagaaataaatctttatttttagggataaattcatcgatagacatgcaatatctatttatttgctaaaaataaataaatgaggggaaataaagacctaaacaagtggagggatagaccatttcatgtggtggaggacacaattttaattagatagcagttctcttctgacatcctttggcagggacacagagccaaagcatatcatctttatactataggttcagtgcaatatcagttattttttaaaagaattacaaatcaatcctaaaaccactggtaatgtgtgggacctagaatagccaaaatgatcaacaataaagttgaagagtttcgttgactgatttcaatacttcctataaggttagctatcaagatggtctgatattggtataagggggtagataaacagatcaatgtagtagaatagagtccagaatcaacctgcactgaaatttttaacaaaggagctagaagaatgtttgctgacataagtcatgctttttgaaggtaaggggtgtgtctataggatgacttataaatccatacctttcaatgtatatacattttacttcctcaaggaggaaaacagatggaaaaactcaaagggcagggcagaactgtggccattaaccttgacaattaaggatctattgagtacaatttatcatagctttaaaagtggcctttattttcatcttttttcaaattctgtattggggccgggcatggtggttcacgcctgtaatcccagcactttgggaggctgaggcgggcggatcacctgaggtcaggagtttgaggccagcctggctaacatggcgaaaccccttctctactaaaaatacaaaaattagctgggcatggtggtgtgcacctgtaatcccagctacttgggaggctgaggcaggagaatcgcttcaacctgggaggtggaggttgcaatgagctgagatcgcgctactgcactccagcctgggcaaaagagtgagactctgtctaaaaaaataaataaataaataaaattctgtattaacgggcttgccactccatggaaacatttggaagcactattcttttataaaattagtagcataaatttacatgcttgttttgagattggctgaattttgttggaatgaagatggtgtctactaagttgatgagaaacatttatttgaatcattccagcacacatggtgtgttggctgtgacagtggctttccaccagcatgtaaagtttgcagttggcttaatttgtggctgtcagtactgcacaatctttagcctaacagtttacaaaatacaaataatccaaacaaataaaaatgttcctggatgtgccatgtggttgctttatatttgtaattcttttagccttgactctctatacccagcattgatttcagaggtagaacttgccttctgctttcccggtttggagcctgaattactcctctaggagtggaaataaacacctatgtcaaggttcagtaagagcttttatagccatctcacttgaaagaggtgattgaatcccttgatttggaatgtaataaaattttagcatggccatcctttctttgcaactgagagtttgaagttgaatttggaaaaagttcttccatatgggaacttactatgtcacccagcaaccggtcctaatgaatatgttatatacagaatatgtgtgtaatacagaatattatgtaatatgtatatattatatacctatgtgtattttacataaatattatatgctagtaatatataaaataggtcctattatatattcctatctgtctctgcctatctgtcatgtcattagatagatcaagagagctatccttcctctgagtaccttgactggtgtatgctgtgaaaaagctttactctcacttaccaatcattcccactaatggatacttgagaagcacatatagctctatttgcagtctcagaaatggtgctgcacctccttaacagccatagagattgaaatcttgactcccaaacaagcatggggatttggaaaccaaatgatactttttctccttctctccagcttttttttcccaaagtccttgcagcctgttctgtctgaggagtctgtagacagagctctggagtgtagttttgggacgattgactgtaccagatgttactaagatcatttggattagggctctattgagcaggtagctagggagcagagtcatattgctttcatatattagagaacataaatatactttatcttttgcttttaaaggagctactgaagactaatgtcatctggtttcctgatcttatctgagtgctgtctagctaatgggaatgcagagaagagtattttttgttgtttattggtttatttgttttatctttcttcgagacagagtcactctgtcgcccaggctggagtgcaatggcacgatcttggctcactgcagcctccacctcctgggttcagccttctgagtagagtagctggaactacaggcgcccgccaccatgactggctaatttttgtatttttaggagagacggggtttcaccacgttggccaggctgctctcgaactcctgacctcaggtgatgcgcctgcctcagcctcccagagtgctgggattgcaggcatgaaccacggcactaggctaatagtttgattcagtagtgtgtgtgtttctctgccactgcctgttccattgcctgtgctgctgttgatgttactgaggcaggttttttgccttgtacagatgctgtgaatgctgtcctcccatggcgtgtatatgggaatttttttgacatttgaggtcttttaatatgctgggtatgaccaaatatccactattagttatcatttggttcttgtttttcctctttttaagtaaataaaataaatgagctaattttgcttactgctcatgctgtatgttattatgtaatgatgttttcacagtaatactaatgcctacccagtctattaataaatcttactaattgcttttatttcctggctcttattttcctgaggcagtctttttactttcttttcttcttcttttttttattttgcaatctgatatttggattttcttgtgatccattgtctgtagaaagagtcattctggaatttttctttaaccttactcaatactctcttcaacccattattccacctgtctttctaatgttctgttcttttcttcaaataagtttgtgttgtctggtttggaatttctttttgaggcatgatcctttgatgccacctagggggcacctgtaagatcgaggttgccctttgcagctctgaaaagccagagatattagctgcttttctatctggtctgaatggtttggctttccttgcattgctgtttttgttttcattttctagttctaagaacagagaatccttaacacaaggtgaaacatttgaaaatcttgtccttcattcacgttttaaaaatctcacttttgcatagtgagaatgtagtaacactcacacgctacttacaattcactgcacagcatttggagggctttaagcatgtttgcttgttttcatttctccaaaaatctctgagctagttgtgactaccactaccatcatcatcatcatcatcatccccatttttaataaatgaggaaagagaagcataggatggtgcataacttgcccacttagggctgaagggagaacccctgctgtctgactccacaaactacctacttagccgttttcgtttagctggttgcatcccctctgttgcccctggtctccggcagctttggatcattgtctttccctgagaaccacttccccttctataggttccatttagcattacatcttctgtggtgatgcagaatttcaaaggtcatttttgaggctgggctgagtagaacagtaggaagaagggaaattgagaagctgttttaaaagaaatgttacctgttttctattctactagttggaaataaaactagttggaaggttcaatctaaatatgttaggagactttgtaggatatcaataatggtatgcatgagcctacaaatgaaaaatctatataaccaactttatttttttaaaaattgaacctaggaatcagtgctgttacataatacagtgtacagatcctgactggcataattcaatgtactcaaagaaagagtatttatcataaaggtgttaatacttataatgatgataatttacaataaaggtgaatatctatgaaagattctgtgtatctaagtctctgctaaagtgttgttttgaaagctgtagacaccaggatattgtctaataagggtcctaggtggaactgcatttgcccaagcctaatctctgtttggattttcaaaccacatattagacccaccttatagcctactgaatctcagcaagtcttttggtcagcaaacccattatgtggagtgattatctccatcgatatgccagaaaagttactaactaaagacgaaatgctggccaaaatcaaaatgagtatgtttacttgcatacatgtttgtatctgtgtgtccacacagagggatgtatagaccacttaaaaaaagtactaattctcttaatagaagtatttttaattttctctttggatgtgtatgggtaataaaggaagcacattgccctgcctaagcagctccaaatttcattagccaagaagcttttctttaagccaccatttactgagtgtctatatgctacatactttattaagtaagtagctctgtggctagatagatatcaccatctagtttttcagctgaaaaaatagaggctcaggcagggtcagtgaattgcccagaacaacacagctcaccagaacgagagttggtgtgagcccgggtctgttggatgctgaagccctggttgacctcatcaaggccgtcctgcccaacctcatcaaggccgtcctgccccttcatgtcactcatgttagtgaagaagtcacctgtggtcctgctatttgtctcttgatcttttaaaattctgcttgtattcactttcccagaactttcttgcttctgtgtctttgctcagctttggggctcttgactcttgtgcctctctgtctttttcagctttggagacatgctgtccttcaccctgacggccttcgttgagctgatggaccatggcatagtgtcctgggatacattttcggtggcgttcattaagaaggtaaggtggactctgcctctttaggctttccttactgtcttctgtcatagctatttttctctgctttgaggatgtttcataattgtctttcctttagttctttatattaaaagatgggtatgattttttataatattatgtatgtgggggtcaggaaacccaaattctgtataaaaatgattgtaagagattataagggattgcatgtgcgcacccatagctcagaccagataagtgtgtcacactgttaataactgcacaagtgtgttaattccccatgtgtgactctgttggtttcaagacctaaacagagttcctactgtcatccttcttgagcctttaatccccaacctggtgtccagggaaaaggaaagaggcaaagtatactgatgacctgcacacctaggtttgaagcagggttatatgaaaaggagggatgcctgagtccatgtgtcttaagcagagtgagcctgcttacttgtaatcagggtgcaaggaatatctcagacatcacccagttctaccagttcttcatttgggaggaagcaaatgaagatggacctggtgcaggaagatggggcagaagagccctaccattccttgcaattgaagtgtaacaaatttgcaactctgtttccattcttctgactaaaaataaacagtcttgatcttgtcactcttaaatgtagattaaatcatggacaattatcatttattgatttattttttcctttctttgtatttgcgaaatggtttataaattcattggcatttctcctccctactactgtattaggaataaagagatgtttggaattcataactttattttataagtatcggttactggaaagagaatttcagtgaatctgtgcaagccagaaaatcagagcaaaatccattaagagtcacttgaagtttttaagccttttattttaaactaatggtagacttaaagaaaagttgcagcaaattggactttgggaggccagcgcaggtggattatttgaggtcaggagttcaagaccagcttgaccaacatggtgaaacctcgtctctatgaaaactacaaaaattagccgggcgcagtggtgggagcctgtaatcccgcctacttgggaggttgaggtaggagaatcacttgagcctgggaggcagaggttgcagtgagccgacattgcaccactacactccagtctgggtgacggagtgagaccctgtctcaaaaaagtaaaaaaaaattagtacagactgttcctataagcccttcatccagcctcccctaaagttaacattttgcaaaatgacagtacggttatcaaaattgataaataagctgtggtgcaatgccggcatttgatttcacctgtttttctatgaatgcctttctctggttaaggatctgatccaggatcccacactgaatttggttgtcatgcctccttagtgtccccaagtctgtgacagtccctcaggttttttgtttgtcatttatgattttgacacttttgaaagttaacagtcagttattttgtataatgttcctcaatttggatttgtctgatatttccctcatggttcaattaaagaaggttatgcatttttggcaagaatgctacagaagttatggcacatcctcagtgcatcctttcatgggcatatgatgtcactgtcctctgactggtgatgttaccctggattacatgattaggtggcatctgtaggatctccccactgtaaacgtgctgctttttttttttttgaaattaatcattatcttaggggagatgttgccttgaatcgaaggacatgagatggccctaatcggttgaatgaggggggtaggatcagaggccccacaggtgtcatgtccgcactatgttttatgttcatttaagacaagagctgattggaaacccagggccttctcaacacatctcagaatcaactctctttccttatgtaaatccataaagccaaaggggatgagcaaaaggaaccctgtagaaaacacacagaaaaggaagaggcccctttttgcctgtatttatcagtggtatgaattgccataaaggaaagaaactgttggaattgccattaagagtaatgcaaaaaccgcaattacgtttgcaccaacctaattgctaaagaagccaaagacatcccgatgtgttataaagtactttcctgccacctttggtggtggcagggaatgtaagcattagattatgagaggaaaaaataaatggcactattttgcctctctaagatcagttccagagaagcaattccaaatctgaagatagtgagtatcattgattttttaatacttaacaaacattttaactttttgaatttacagcaggctttcttttctacctccagagtgcccggcttgtctgttatgagagcctcttttgctatagaatgtaacaacaatgttgtactgaatgtgaattccttgaaattatgttctactttcaccaacattagctcttttgattccccacagcaatcctttccagaacagaacagatagtcttgttatttctggttaggaggcagggatgcagtggcttgccgaggttgaatgaggtcacatagtgagtgggcgtccttggtcacatggtcagggtgcttctcctcctcatcatgcacctgtgctttccaagtggtggaaggcatagttcccggagccttgcttaaccagcctgtctcttacatattcctccctgaccttactgcttagagttaagcaatttcttctgctctctgttcccctgggatctcctgaatgcccctgttccagcacttgtcacatttcggtgaattttttattcatttaacagtatttcccaatagagtattacctcaggaaggcagaaacgtggctttcttcatgtctttatcctcggggcctggcacagagtaaggtcttaatacatttctgtgaaatgaatgaataaaatttgcttggaagcattaaaaatacccacagaatttgaagaagagaaggaaaaaaaagtactgtatttaaatatattttaagtaaaatttcggtgatgagtggaaaggaattagaaagctgtgtttctttaaatgatgtgagcaatggccaaagagaatgacagtcatttaattttctaacaacttaagaaaatgtttttcattcattgaaattaattcaaaaatcatattaaatgtaagaaagtaaagactgacagtcttggtggtttaaataaaaaattaagtattttttaaaaagcagcacatttaatctatttcatgtcctcattcccagtctcattttctttgcattgctacttagagatctgttacatgaatttgaaaaaatagtcatcagaaaattacttacttttctgtaaggttaacttttttattcattagctggaccaaattcagcactttgacaacccaggaattgtatgcaggcaactgtcttttaaatggagctttatctcaacaaaaatcgactaggaaatgggctgacaaaagatgcctatctctgtggtctagagttggcttcctattaatgccaaattcataccactttggagaaatattttttttccctgccagcctctgtctccttctctattactttatctgttttgttatgtgtgaatctagattctggtttacaaattttggctgcaataaatagcatcatttcataaacagctctgaaacttggaattccttgataccaatatataatgttgcattttaaagactcggctacttagggagagagtaagaaaatatggagtagaaagaaaagaaaaaaaaactttaggtgttatgagttggtttttccctagccaagtataacatcagtgccttcttttggaaggaaagtttcatataaatgctcttgaaaccctagctgtgcaggagaacctggcttaccccgcaaatgttttcagtgcctggacaaacatcccaccattttgctttagagacctggtaatttttgcctcttaaaaatttgagagatttacaggcatctacctagataattttaaatacaggagtggagcttcatgttctccatggctggttttttgttttgttttgtttttgagacagagtctcgctccgtcacccaggctggagtgcagtggtgtgatcttggctcactgcaacctctgcctcctgggttcacgcgattctcctgcttcagcctcccaagtagctgggactacaggagcccaccaccacgcctggctaattttttgtatttttagtagagatgggggtttcaccatgttagccgatctcctgacctcgtgatccacccgcctcggcctcccaaagttctgggattacaggtgtgagccactgtgcccggccctccatgattcttttaggttttgataacataggagaattttaagatctcattctaagtgattctaagaagtatttattggatcgttgattcatgcactgtaatgccccttagcttcttaaaagttacataagtatttctcttatttagccaagatttttaaatgaatgagcagtacaaggagctagtgtgtataattaattactgctaactcctcttgcttcttccttatgttacaggcctactttcgagaagctgtactgtggctggcttgggttggctcacttgtgtcacccaaaagtacagtaatggagctgggataaattgaaaggcagagggaatcattattactcttttgggggataaaggaaatgaaaatttaaataggcatgaataaccttctctagctatatgaagatctatagttttcaaactggacgtagagacatgtgtccattaactaatttatacattcagttataaggagttggtctcaagctccctggaggacgacagttattacattcacttggatcagccctgatgcgttggttattaatactcattaagtggaagtattaggtcatttgaatatctggctaaaaccagtgacaaataaaacaaaagaaagaagttaagtttcagaaaaccattagcatctacttcagacttgtacataggactgtaatgcattgagtgccccaggtgtgttacacaaaatgctcattatgtaacatgctttaggattgctgaaatgattagtttatttatgtcaaggaagaggtgaattactaggaacatgaattttaaagaatactttcatgaaagtaagggattcatttcttaggagaaaaataatgaatggaaatggaatatgtatgtgggatataaatatgcctgaattaaagcaaagacagcaaattatttttaccaccattgagcaagcccactggcagcagagaagagttaatgatttatagagaactttaaaacccattatgagaaggtatacttcatatcagaaaacactgagtgtaggctgggtaccgtggctcatgcctgtaatcccagcactttgggaggccgaggcgggtggattacttgaggtcaggagttcgatatcagcctggccaatctggtgaaatgccatctctactaaaaatagaaaaattagcttggcgtggtggtgcatgcctgtaatcccagctacttaagaggctgaggcaggagaattgcttgaactggagaggtggaggttgcagtgaactgagatcataccattgcactccagcctgggcaacagagcaagattccgtctcaaaaaataaaaaataaaaaagaagaaaacactgagagttctgattgaatatttcaagaaaggaaatattgtaaaaaggatatttatggaagtaggcaactaattcagggggtaaatttccatttgatggaaaacttgaacataaaataaactgcagaagattatgtttcagtaacccagcaatgagttagaccactgggccagtgttatttgtatatactctgtatcaaaacggagacatgtcagatgtatcacagggatataaaataggcagctggaaatatgaatcaccagtgattatggattcttagaaaagagtgataattgggaagagaggagtaggaagacaatgagattgataatccccctttttaatttttggcttttttggaatatccaaatggtggcatccttttggatgccaagaataggcccgcagtgtacttcatagtaaatgcctttttatctgtccatactagactgtaaggtccttgaagtttgttattttcatctttgtatttccagctctgtgggacagggcaagcctgttacatagtacacacgcaatgcatgttactgaaatggatcacttaatgatgagtaaatattggctgaatgaaaagagtggataaagatggaggcggagggtgcttgacaatatcagcaacagcttctcaggcagaagcctccatgcatccttaaggcacatccaaatttaataaatagagacaagcaggggagccgggaatgaggagaaaattagttgcaagaaaatctgaagtattgtcaatgaatttctttatgagttcttcagtttcctaataccagtgccaagaattatgccgagagcgtgaaaaatggtttggtggggtgggggaggagtcagataatttatcctctgtttagaagatgtctaagttaagtattaaaccctgaacacagtgtgacaataattggatttttgtcagagaaagatggacctagggaaagaagggtggccttagcatggtagatttggtggattggagcagactgcgaggaataagtcaagggcttgccaaggatagtaaacatgtcggagaaggttattagccatgagaagagctgaagcagtcttttgagaacctgaaaatttccatactcttcctgaagtttgtattttaaaataatagcttttcggaatgtaaaatcataatgtcactgcacttcttcacattatttcccacccctgagatccagatgtagctggggtaggcagagtgttggtatctgcgtctcccacccctcctttcacctggaaatcagcggactagggacaattccgatggtacctgggaactgccatggtgtgctgtgcatttatcatgtgcaaagatggagaggagatgaggcaagtggtctctggggcagcaaaaaagggagaaattagtgttgacaggggggaagcagcaagagtttacttgtcgtggaaccaagttatttagcttttaagaacagtcattatgctgatataataatggctttttattgtgagctgtcaacagacagtaataacttttaatgaggcctctaaaataaaacctttatggtacccatgtgtttggattactgcgatccattattctaacctctattttattttccgctcacattgtgatttattatgtttggggatttagtgattaattccttagagaatctattttggagcttaaagtagtattttaacttttagtactgctcacttaaatgatttcctgtttgctaaatttgggagagatgaaaagaacttgttttaaccatcagaaattggaagaaaggggtaacgagtttttcgtttaagagagtggccggtgactgagaagttgccagttgaattgtgttgacaagtgagatttgtgcgagtcccttaagaatgcaacaagaacataataagcatataaaagccatggattgtgtggatgaaggagtagcctgggaatgcaagaggaatggcaattaacatatgttgacattaccatcccagagaaacacaggtatccttacaatatatgtgttgaaattgtctgcccctaaaagatgaaactcaggagaataatcctaggaaatacagaaagaataatccttggaggtgtgtcttttttaaaacatttgcttatcagtgaattatagagatgagataaatcatgctttgtaatgatatcatgaacaatccctagttcaatgggtttcttgctattttgctgtaattccaggtcatcctcagtgcctggtgtttcttaaatgagttcccgatttgattcatttgttcccttctccacgtctctgctctacttaccacgagcagtcaattgtgtcccacttggattttcagatagcaagttttgtgaacaagtcagccatagacatctcgatcctgcagcggtccttggccattttggagtcgatggtgctcaatagccatgacctctaccagaaagtggcgcaggagatcaccatcggccagctcattccacacctgcaagggtaagcatgccaagatgctctggggaggagaaatgcttcaggaagatggccacggtaatgcactgggaaacgttttatgttgttatagtttggttaaatgtacagaaaaagaatctcaatttggcatataaccaaaccacgtgtcacactggaatggcatggttactttcccttggcctctgtccctcactgaactccaagctggttcttggcattgcctgtccccacgcctggcccttggtaagctctcagttttaatggatattggtagatattggcagagttttacttttaagaagataaaacaggatgatttgttctcttaagttctctttcttaaaccatgtaagttaatgttttctgtgatataatgagtattttcatagttaattagaaatgtaatgttatgcatttttactaggaatttttaaaggcaggcttctttcttagttatgctcaaggtgattctagtgagcttcttcttttgtattttataataaaatgtaggattttttctagtggcttgagctataaaatggacataagatagctgcccctgcagcctgcagtctttgaggcatttttccccttctttcctccctgaggtaactaggaaggttgtctctgacaataccaacctgagaaggactctattgtacagtgctaccttagaaattcaagtattttggattgcagtgataataaacattatgagcttgcttacacaggaaaggaggttattggaacaatactggggtactttgtagaatccagaaatgacataagtagctaagccttgagaaggagagaaaccatagcttccccggagtcctcagcagatggccttttctctagcattttggttggcactacagtgacccaactccccctaactgttgcccctggtccattaggtcacaattacaaattctcaagaggaaacccaattggcccatttgggttggtggtgcagggtgggaatggttctctgaaatgttaactgttgtgttgataatataaactaccaaagcagattatattagatattattttcatttggaggtgggaggattaccaacatttaaaatttaagtcacagaagctgaggattgtggtggcctccgtgattgtggcctcagaatcataattcttcaaaatgatgataatgtaaggtagcttctctagaaataagaccagtttcacatttcctttgaatgtgaactgtattaatttatatactgtgtcttttgtgggaatctcaaaggcacacatcttcatcccaaagcacgttaccaaagtggagagtttattattctccaagtactgtgctaaggattttacatgcataatctcattttatcttcacagcaatcccatgaaataagtgtgtctaaccccatgttgtagatgaggtaactgtgccttgggggatactcatgaacttgtccaaggtctcagccagcctgtgatgaactgggctttgcaccctatcctggcctagttctaagctccacctctctctcactggcctgataagttattcctaaatgtagctcataagtcactctttgtttatgccttgagtcctccttatttactgtttaccacttgccttacattagagctttgtttcattttattatttctggttcctttccagtgaaaatcagatttataaacaaacacctgttctttttgttattgaaatgtttatatttggaaatagatttttagaatatataatagagccatccaattagcccaagaatgtggagacatctgaaactactccctgatatatttcatgtatcagacagaaaattacacatacatacacatacacatacatacatacagacatacatacatctattactagtagtacatcaattacaacatcccctaggtttatgcctttaatctgaataagagagaaggctgcctatatttctgggcattctgcactgaccagtgtactgtcagctagtaatagtagttgtatatttaccaccttgtgatgtttgaaatgcattctcagtgcaaaatgcattttctaggccctgcctttctctctcactttttttggggggagggggctgattttgagccttttcatggtttgacccagggctagcctcttctgacttcgtgttctgattttctgaattgttctctatctttacaggtcagatcaagaaatccaaacctatactattgcagtgattaatgcgcttttcctgaaggctcctgatgagaggaggcaggtaagttgcatttctttagtcttatggctatgtcaaggctaggaactttgtgtgcagagaacgccctctccttctattcggggactcattgggcctctctgctatcctggccacagatggactctccagagcagctatgttccgctgcacggctggcccgctggggtccttcccaaatccaggggcaagtgggtagagatggataagcccttgactgatgagggatgctaggagtgttccagcagtagagccttttcatgaaatgaaatgcaacctggaagcccagatgtaaaaagatgaaaacgctgctgtggtggaagcagagttaggagcccctgcgaccttctgtcatttcatgggatgctcactaggttgagggaagtgctgttctcattttctgtatcaggaaacagaccctgaggggtgccatgtttttcccaaggaaggaggtgatggaaggtaagaggacaggagggataatatgcagatggctgctccttgtggagataactgcattcgtatgtcagaggggctccttgcttggtgagattacttacttctgtgtgtggatgtggctgggaaattggagccatctgtttcctctcctgtataaaaagagccgggtgcggtggctcacacctgtagtcccagccctttgggaagccaaggtaggcagatcacttgaggtcaggaagctgagactagccttgtcaatatggcaaagccccatctctactaaatatacaaaaattagctgggcatgatagtgcacgcctgtaatcccagctactcaggaggctgaggcaggagaatcacttgaaccaagccgggaggcagaggttgcagtgagctgacatcacactgctgtactccagcttgggcgacagagcaagactatcttaaaaaaaagaaaaaaaaaggaaggaaccccttaatatacatacatggaacctttcctctgatggtgtcctttgtctgtagatcctttatttctttcttcacgaaggaaaggagcattacagaggggatgtgaagaagtggaattttgccttgtcttggaatttaggtcacacctcaaaatccattcatgtttttttcaatcaacatgtcatgtaatatgttaccctggtcacaatttccttccttaaaaaagtgggtgggaatatgagctctttcactcacctagaaactatgctggggagcttgatggcagttgccagtgagttcgtttagaagaaattagaaagcgaacctgctactgaatgctatgacaagaatttttggattttattttgctttttcattgccaaggattttaaacctcagtgactaaacatgaggggttctggtttgttttccatttagaatttcttattcatccctggggggctgtgtttgcacaagtagtggtgtcactttatagtttcctggacgtttgatttggtgttcgctggagccaggtggaggtgcctgccctccacaagcctgtgctaggggcagtcttaccgtggctggatttttaggagtggctttgcagatctgaggtgaaatcatcgatagggctgcttctgtgatattttagtctaaataccgaactcataactcccaagcagcccggaagttgtctggaagctctcaccgtgtacatacccaagcttgacttgggcattggagcaacggggtccttctgctggccagactggggacttctggcccagccacatggtagctgagtgtagcgtgtggggtcaggaaggttgcattctgatctcaactcttggaagtttcctttccccatctgtgaaagaagaggatggattagaggaggtgaaagttcatgcccactctaaaggccatttcacttggatctctgaatctagacatgagtaaaatgcttactgcatcttattttataccaaacactactgttcatttgttaaattggactctcatgaccatggacaaatagggaatcaggtgtcaatctgtactaacttcaggacattgataataatggtaatataatggaatgtcgatataagattaggtttggattttgtgaatcaagtctttctttgaaaactatgcaacataagactgacaggagacagtttggctatatattattctaataaaccaccacaaagagtaataaaccatgacaaagagtagtctaataaccttaaaccatttaagaaaagattccaactaagaaagactgtatataattcagcagaaatttatgaagtattatatgactcattcattcaagctctaaaaaatacctacaaggtatttaatttacttgcccatggaaaagtgatgtggacttcataaactataaactcttgaaattaagaatgttgttcatcaaaataaagggagtatcatgatttttaaatttaaaaaaatttcagtgagtagcgagatagctctaaaaagggatttcagattcataatgaagaaaagtttgttggatattattttctgaaggtcagtagaggcctgtaaagcagaagactgagctaactggtgacatcatgtgggttgctgtggatttatattaacagctgagcttgtatgccttagtctgggctctatgttctaagtaaaataaagtttcagctggtctgaatttgacgttggcattgttattggcgtatgttctgaaaaattaaaagttctgaatttttggcaaataggaaaattgaccaaagtcagccatcaatgataatattattgagagtctggcatgtgccaagcagtgttcagtgttttatattacattatttcattttattctcatattcagagaaagccacattatttctgttttataagtaaggaaattgagcctcaaagggagtaaagaacttgaccaggttactgagcgggtaagaatcagagttcgagtctcaaccttatccctgcttttacctgcaaagcatcccatccaacgcctgtcagagatgtcactcatagaattctcctgtatttgccaagtaaacaactccccgaagcctggatagcaccaagcccattttctcactccaattagattgaaatataatctaaacatgtatttactggatttgcaggaacactattttttgtttgttttttgttgtatctgtttaaagccttagaaccattgctttgtttggagtagcctgattccacttcagtcaaatacttttttaaaatttcatctttttttgacttggggccagacacattcacaggactccattatctggggtttctttgaatttggaatgcttttaaacacttataccttatttctgctgttactgaaaaaaatgccaccatggtcagaaggacctgtgctgttttttcctttgcatctgtgaggtaggccttactgagagaggcctgtgctggggcctagggtaaagcttcctcctctgggaactcccttcccttctagggttcccccaggggtggaggccttgctttcccatgcctctgggatgtaggagattctcagtttcctggcacaaacggagggaagggctgggctagttttgtcggggaggaggttgctgttaggcgggcaaatggatccttttgcttacaacttttaccattattcagttcactatttcaatggcaaatatgttggtgagatcccttccaaatttctctacaaatacttatacttttgataagcactatttaaaaaacttgttagttaaaagatttggtagaaaaatcagaaaatactgactcaaaaggaagaagtttgaaagattcctgtaattatattcccagaggcagaaccacggcaattatttacaactcttgtgactttcatggtgctacttccctgtttgttctgtgcaaatattctcctaatacatcattttttttcaccaaatgtgagcatactacatgcattgtagtttttctaaacttcttttaaaactaaacaatattttgtggacatctttccatgtcagtatatctggattcatatttgtagctatctatacttttacataattttaatgctataaaatattccccatggattctcacatttactccaataattccttactattagaccaaaaaatggaggcatggatatttctattttctctttgaccaagctgctgttccttaggagggtagtataaaatatttatttgttattttatcaaacatttattgtcttctcggtgtcagacattgtactttgggcttggaatacaaaaaagaaaaagacagtttctgctcatgagggactcacagtcttatgcagacaataaatattgtaaacagacaattacaatgatttctttagtagaagttggacatacattgtcccttctaactttaaattttatagactgatagacaaacataggaacagaaatatttttttccgtctttatttatgagcaataatttcatctttttaaaggaaagaaattaaaacagctataggatcctttgaggcttttatttgtcatctggtctaggagaaacaaaaaaaccaccaccagtgggcctttctatgaagatcagcaagaaagccctgctttctatgcctcgtggaagggaaggttccttctgggttaccatttgagttgtttctcaatgcgtcattgctcctgctttcttgttttcaagagtataagacctagtattggatgttgacttgagtgccatctagcttttttgagtcaccttacagtatttaagcacttttcaatgcagtgggtcagcaggggcgttcaaatacagtggtcaacctctaacagagtcctctgaatttccatcccttcttctctcctgcttgctttcctttctgtggtggcgatgacgccgttaggttgatgtagagagcaatgttgacatccttgattgtcctctgactgtaagtcacccacgttccctttgttagcgtaaagtgggccctgctctcctgtgctgctcctgtccacccctgcttgtatgccctcctcagaaatctcccccaccccccatgttcttggttttctttgctttctgcaaatttgttttaaccttagtagaaatcatggttgagtttttaaaccgtggcttagtttcttctctactcagtaagagtagcaacaccaaaaacaccccctaccacaaaacaacggtcaagtgtcttcctgaatatgagcagtatttttactttaaaaggctccaagtgctccaagactatgcttgatatactattttcccttagtctccacttgtcaatatttataaagggactctgtgcatcatttcctttaataaaatcacccttgaatcctccataccagtcaggagatgccaaggcacaaaacaacctgcagaaatcaggccttgcagagctcagtgagtgtagactctagagctttgcatcacccagatatttgcccttcacttaaactccactcagatcacttatgtagcctggtatatgtattactcactctttggttttgcacagattaagatgaaatgacttttagaagatactggaatctccttgctacaggcatgtgttgcctaataaaagctttctgcacgtacgtagtctaataaaagatgatgaggctttctaatagccattgctttgtttggagtgcctgatttttatttagcacccacctttttctggaaggaagaaattcctaaagaaaagaagtttgcaggtgccagatatctttcctttgcttttggacattgcttttacattctaaataaaacagtcaaaaaaataatttgaatactactgcctgtttgagttcattatttcataagaaatactgctgatatacagttacgaagcacaccccaggataaggtcatttttggccatgtcgaaatgtagctttctaacctaagcctttgtgtgggtgtgtttttcttccacaggagatggcgaatattttggctcagaagcaactgcgttccatcattttaacagtgagtacctatgcgctgtgacctctttgtgggggaggagtggcctggtgcatttgttaatctcttcttttggcttcagtctgtggtttgttctgtgacttccttctgtggtgaagcagtaggaactctaatgaaggaaaaagtgagtttttggaattggaataaataaaggctttcccacaggaattgcctcattggattggagggaggggtttctggaactgctctggagagagaaagggggaacgcattctggccggaagggttggatagctctctcagtggggcaggttagggagatcagggcttaaaagattcaccctgatgaggttttgctctttcaatgaggaagctagctgtaaacatatcaggtaccaagagaagtcctgagatgttgaacatcagttttgggggcccgcatgcaagagagaggaaggaaagatatagataggagccactcattcgctgcgatgcaagatgaccttaaaccttggtggaaaaaaaaaaaagccctaagtgtcaccttgcaaatgtttagaaataaaccaaataacaagatttcctgaggccttacccgctatttgacttaccagctacttgaaagaagcaggttgattgattgccctgcttacaaaaaagaaaaaaaaaaaaaggaaaagaggaaaagaaagaaaaagaaaaatctctgtttgcgtgattccaaagagcagttcagcaagcttacagttaaaaacacttggtcctcaaatgcaggttttattattattcaagtatggtgaggccaacagatcaggaggtggctggcattgaaaagtttgttaattatagttccccaaaggagggggcatgccgtgccactgggggattgtcggggcaggggaagctcctgagtcaggaggcaggggaagcccaaggagacctgggcgagagcccttactgtggtttttgagggaagggatatgtgaggccaggtaagctggctgagcaggtttaggattggctagtttgaataatttcagtgggctttggagtttatgggctgtctccagttgtctggtacctggccctgggtggttagggcaggagaacagtggtcctaagagtaggagccagagcttgtagaggagtggggggtgggtgccaaggctctggactgattcatttgcatatgaaaggagtcatttattatctctaggaattggctagacctgggaggagcagtctcttcagggtcaacaaggtcccagatgtcccaacagcagaaacaaatgtctaatacacacacacactatcccccctccctctcccaccaatacaagtaagccatcaaaaattaatgttgaaaataaatgttctagatcccaaagccagtggtaatgccagcaatttgtgaccaagttagttcaattttaaacttcctggctgtcaaagatgacaagaaatgtatgagtgtaactttcattgtttgataaaaagaggtcccccagttcttcgggaaagataaaccttttccctctggaactgaaatctgaaatgaatcttgggagagcatcttaatacattctaggtccaattgtggttttggaagtgcagaagtattcataattactgtccttctttatattggctctcagtaaatgtagaagcagcagcatcaatgggtagctcagtgtcttcatattaccttgatgtgggagtcagggttagaatgccctgagatatgagtggcattaatgactgtgttcaccctgtctcaaaaatcagtttgcttcagtgggacttcttgtatgagatgttgttgatggctgaagttcgaggttggtactctcctgcaagaacttggagtgcagtactttcgagttgctaagaaaagagattcccatacgctttggatactaagtgtgtgccatgagttaacatgcttttctgaggattggaggataaggggtttgatttgctcctaaccatccgttatctagcttccctgcttcccataattttggtttggtgactgtattctctcattcctccctgtcctctttcttctattcctcaatcttctcccacccctcctccttgaattagctatttcagcatggcactgacagctatggtgtggattgcaggtggatgtcaggttgagagtcacccaggcagcactctaaggacctagacttcctccaatcctggaggaagatcatttttctctacaatggggagctttgtcatttactgaacggccacttagaagttggtttgcagcagtctgtctacccaggagcaactacagattgccaagagaattggtctttcagataacatggcatgagtggggctagcacagttgaaataactgatttgatgggttgttccaccacattgatccattgtttggcatttttaatgtacagtcagaatctctgttgaaaaggctgtatgttagtcccaaatgctgaatgttgagttggtggcagctgtcccatttctgggcaggggtgaggggattgggggtggacctatccagtcttcctgtcctgccactccttgtatgttctcttttcagttctgtttctatggggaaaagtcattttatctttcatttaattgttaacagtgagtaaagtaattcacgagcatttgctctctgcttttgatggtagacatccttgtgtagctcccacagtggattaagatttgatgggtattttgcttttgtgtgttccttctaaaacttttccccattttgaagtgggctcacctgtcagagacagtcccagggtaagataatggcaaaattgcttcctatgggtatgcatcattggtttttctgctgcgtgtgacagatgcttccattgtagaaatccacagttgtcttggagacacccccatttcaagcacatcttctcttgacttatatggctgccatcatcagtccctttccagcgcttttccccttccactccctcctgcccacagtaggttttttcatggcctgtgacctgaagatcaggaaccttactgggctctgaaattcaaaggaaagctctgaaattccctgtgccctcaccttccttctccattccttatacctcccagtgaagactgtgagagccttcttgagtgttaattctagttgtttccttttctttcttttttaaaaaatttcatttgtgaaccatctccctagcatgtcatccgagcccagcgggccatcaacaatgagatggcgcaccagctgtatgttctacaagtgctcacctttaacctcctggaagacaggatgatgaccaaaatggacccccaggaccaggtgagtgctcattggacagcagtcaaagcacaggaaggacagaaagtgtcattaaaagtcttttcttgaggtaccctgaaactagggagtttcagagtttgatatgatgtcattttattatcatctcagaacttaggggcatggcttcaaaattaggtgaatctaggatcagaaaatataccaaatgcattcttccattaggctccaaacatgcatgttctttctgcatttattgaataagaaagtttgatgtcacatgaccacagactttagctcctggccccaagtaacatttaatagtagtagctttggagtcaagttcccagacaactagggcctcttggtgactctatgtggcattgattctgtggggttgagttagcaattttcgttctccagggatcagtgccaagagcagggtcccagattaaacctgatttctgggccagcatttctgtcggttggctgttggctgtaactctctgctgggtctcttgttgtgcatgaaaggttatagctccattcagaaggctttggggacctttgctgtgtgagggtagagtgagaggaaacagctgggagccctgccgtagcacattttcaacttaaacagcgctgcagctttggaaaggaaaacactcattattggcacgtgagggcctgatctgttgcagatgtgaactgcatatgtgaagtgtgtagctgccgtggcacttcattcatggagcaaggccatacggttaagaatgatggagaggctttgagaggcggtgaatgtgccccacgtttttggcaaggtgtggtcatcccagggagaggagactgtcatcttaccacttctagtggcagagagcaatgcctcttaatattgaatgacatgacgctctttgcttggaaacccttttaaaaatttatttatgtattttattgtggtgggatatgtataacagaaagtttactattttaaccattcttaagtgtacagtctagtggcattaagtacattcacattgttaggaaactgtcaccaccatctatctccagaactctttttatcttgcagaactgaaactctgtacccattaaacactaactccccattcccctgtcctcttagtccctggtaaccaccattctagtttctgtctatgaatttgactactccagggacctcatataattgaaattggacaatatgcatatttctgtgtctggtttatttcactcagcataatatcttcaaagctcatccagattgtagcatctactgggattgccctctttcaaagcctggatagtatcccattgtatgtccacaccacattttgttcatccatttacccttggatggacacttgggttgtttgcacctttgaccctttctttcttttttgtcctgtgttggtttccatgaagtaacttagtggggtgaggcactttgggtgcttcttactttgttcccaactgtacagtatccccagtttctctagcttagctttctccaatcacgacccttccatcatatctgggcctctcagttaagactgcactggactatcaatattcgtgctccagataactacttggctaagaggaccactgtggaatacagccaggcctgaccagcagggagactgacgggggaagagtggtctgcaaagccctaacttagaacattggttctcttttatctgtttttcttttgcctgaatgcagtgattcatttagaccccagggaaagagggagtatatgtaatgtcacacaatgaaagcagctttttcccctcccttttctttttactccctgattccttcaggctcagagggacatcatatttgaacttcgaagaattgcttttgatgctgagtctgaacctaacaacagcagtggcagcatggagaaacgcaagtccatgtacacgcgagattataagaagcttgggttcattgtaagtaagctatctccagtatgcgctctccctccagcctccccgggcctgacctcagccacataactgatgtctcttccgagcgtgtggtcctcttgcgctttacggaatagtttccacatttccagatgtttagctggtttaaacaggatcacatgaaaatctcttctggcttcagtgaaatggaataacttgcacaagtgtgactaatactgcatttgtttattcagttctgattaagtgtaaccgagagtagttagcccggaatgtatctcgacttcattaaatctatttcacaagatgcttaagatttgtgtttgccttaaatgagtgatggatcttattattgggttattgagttgattacttacatacatcaattttatatcaaagtcaaattgaaagtctcctgaaatttaatcctgatgacattaacacaatttatgttttcttaaaaggtctctcttgctatgaatgctaataggttgtctcctagattttttttttagtttgcaaatcagaacacagcttgtcctgaatataatccattgttttcatttctgtttgcactatattctcgattttctccccatgaagtctctgagtgaccttcggctaatatcaaattctgcagttgtaaaattggatttcaattttaatccccatcataaatggcattactgagattttggcttcggtgattagaaatcaccaggcattattttatagttccaaatactctttccttggaaaaaaatatataagctatatatctgtatgtgtgtgtctgtgtgtgtatatatataaggtgtatatattttatatatatacatattcatgcatatacatatatacagacacacccaaatatatatatatacacacaatgtatatatctgtatatatactaataataatatttatacatagtttgacaaatggtatcatgctttatgtgttatttgagaaggcttgtctttcatgggaatattctttgaaaatgttttcatattactgtgtttcattactgatttgtttttcattatttagatgtaatacaatttatttaaccaagcccttttactaaatgattcaatgctttgaaattaccataagtctataattaatatcttacagcccagaatgtatgcacacccatgatcacattattaggataaatttgtggaactgtactttgtatgagatatgttttcaaggcttttgatactgtctaattgctttccacacacagaaagtcatgtccattttaaccagcagtgttcattttttttttaactctctccagtagtgtttcttaaactaaaaaaacctaaaaacctaaaaaactaacactctgtccagttattgtttttatagtgttagttttaatatgacgttttaaataagaatacttactgcatattcagctttgcagcttgctttacagaggtattctgaaattatttttgtatcattatattttatgtttcgaccttggcattccattttatcttttagttgaatcaattttttaaaattttagcaaaaaatgtcatgactggtggagcgggtgagtttcctgtacttgtgtgtcgatgaccaaagctccagggtggcagtgaccttgctggcagagcccctctgccagagcgatggtccagggaaggcggatgggactcactttctacctcaccctcaattccaagttttacttttatgtggtaagcaagacatatcgaggtcacttgggaggctttgcgaaatcacccaatctctcttaccctcaagtcatatcaaaattaccaaggaagaatcagggcatgtacatttggaaaatactcttaattgattcctcttctgagggagagcctggttctagggtgctcctgtgactgcaattttatcgtcctcctcctgccagtgcctggatttcttctgagctatgtagaaaatccaaaacctgaattctttccatgtgctgcctccgggatgcatgtgtctctgtcccagtagtgattttcctcgggggcagttggatcccagaatgcacagtatggagggactgtggagagagagaggttgggggccaaccacatggaggagataggattactatagaatctgggtccctgtgagagctatctgtaatgggggtgtgtgctatgaagcatctcctttttattttcagaccctgttcttatgtgagatgaccagggtattccaaaatcagagtacattttctcaatgtagctccatctgtcttaacattcttgttaattccttgtacagtttagtcttggtgtatctctgtcttagttttccctgtctggggagtgttctgcttcatgagtacagaataatagttttttttttttaactgaaagttaattggaggtggttttaaggcctttagcgcttatgaggacttgaaaagtcatcctagaaaaagcaaagactctgaacagagaataatcataagagagtgttggttttctttatttttccatggttcttttttagtttttgattttagttattcccctgcaacttctcccaggccagtcttgcatcagagagttgagaagttggaacgactatttagtaatgattttgagtgctggaaatgatccagtaacttttgacaagcagatattttcacttttgaatacccagccagccagaaatagacaggcctcagtaaacagaaccgcatggtcattgcaccacctagagacggtcttgcaaaaacgctgaaagctggctgatgatatcagggtctggctgcaaaatctctagatgctgtaagcagtctcgtgcagaattctctctgtacttcccaaagaggaatcatcttgcctgttaaactccttactgaactttaaggattaatttgaggtttggatcatcttttggatcactttgaagaaaagttcagttcataagattaagactgctatttctcatgtttctgctcccaagtaggcaatgcccagcaagcattacatgacaaggctttggagttcactgggcctagatttaattttagctttcctccttttgagccatgggccagtggttcagtcatttaacctgtttgggcatgggttttctcagctgtgaaactgggcagcatcttttctgttttgagattatgggagggccccacaggaccgtctaccagcgactagcacagcagctggaaccaaggtgcactcagccagtgctacttccctttcttccttttggagagaacacatcatagaaatcatctgcagccttttaagttttccaaggtaaaagtggccattgcgccaacaaggcaagaagaacagtttattaaaaggtaataaaccacaacacctttgaggaggcagatgggcatcacattccttctcagcacaacatcccaatggagcaaatttttctgataaaataattctaaagtcacaatctaggtggctgagtggcttgtaagtttagtcataacacagaaaagctgcttcatcttctgagatctcgttttttgtttgtttgtttgtttgtttttggtagagttttgctcttgtcgggtgcccaccaccacacccagctaatgtttgtatttttagtagagacgggtttcaccatgttggccaggctggtctcaaactcctgacctcaggtgatccacccacctcggcctctcaaagtgctgggattacaagcatgaggcactacaccagccatcttctaagatctcttgttattgattctgtggtttcaaaatggacaggcctttgtaggtcccctggtgggaagagacagagttgtctgggataatgctattcttttttttgagacagagtctcgctctgtcacccaggctggagtgcagtggtgcaatctttgctcactgtaacctccatctcccaggttcaaggattctcctgcctcagcatcctgaatagctgggactacaggagtgcgccaccacacccagctaattttttgtatttttagtagagacagggtttcgccatgttggccaggctgctctcgaacttctgatctcaggtgaaccacccactttggcctcccaaagtgctgggattacaggcgtgagccaccgtgccctgccgggataatgctatttttagtggagcttctaaggaagggcatatggattcctgagagtaatggaaggcagactctcacctctaggatgactttattttgagaacaggggaaatgctgtatacaaagttgtccctcttgattgtagccgccaagacctgtgcaccatggctttcacactctgcaaagtgttgtgttcctggctagagccctttcagaatttgtctctggtttatttccaatttgtagtctctctatttgtgaatttttccttgttcagtctaccggacaagcatgaaaaaggagatgtctgtagttcatctttctgatcccttctgaatcaaagcagatattaaaatcagacaaggcttttttttttctagctgctttgttttcctttcctttatcttgactgcagagaaaataagctttttttttttaaaaaaagaaattgtttctcaacaatataatgtgttttaacatgaaatattttacaaaaaaatttcatcatatttcaggatcatcctggagggaaaaatgactaaaatgtgaaggtggaagaggttatgggtaatggtgaaaacatttcagaattaagattcatgttcaaatttttaagaggattttctaccttcttgggtgatggaagataattatctgtagttacacaagtataattacacaaaattacatatgcaggggttggtgtcatcttaataatattttttcagcaaatagagatggcagggaatgaaatgaactgcatatttatatttttccttctctatctctgtccccatcctaatactacggaaggaagcgtctttgtctaaatgctactaggcttcaacagtcattgtgagagtaacattgtgattaagcttgggctgtagatttgggttgctgacatcgatttctgactctaccaatcacaggctgagtgacttgggcaaggtacttgacattttcatgtttctgttttttattctttaaaatgagggataataattttctctatcaatatgtgtgttgtgtagattaaattagtagatacttggaagttgttcagagcagtgcttgctacatagtctgtgaatctagatgctattattacgatcttatgattgatattaatattattggaatggcgtccagtgctctgtgacaccgtgagagatggtgatagcagaacgtgagagttgtaggttgtccctaggagggtagtgtgaaaatccgtggtgaaagtaacagttaaaggtgaaagaacactgggtgcttgggaaactgcaggtcatttatcatggccaatgtttatgttgcagagagggaagtagagttgccttttggagtgagggaaaggttatagaagaattttaaattcaaagggctttgcaatatacagtcagtcctcattattcatggattccgtatttgcaaatttgcctttttgctaaaatttatttgtaatgcccaaatcaatattcaacatgcttttttagatcattcttggaaaatgcacagtggcaaaaaatctgagttgcccaactcagatgttccagctgaagtcgaacaagacaccaagccaccaccctgccttcctgtttcagctctcatgcttcaaacaggtgtccctttcccagtctgtctaggccacgtttttctcatttttgtgcttcctgctttctgatggtaatttcagtttcaaatggcccttaaatgtagtgctgaagtgctgtttttatgttccgaagtgtaagaaggctgtgacatgccacgcagaaaaaatacgaaaatatatgggtttgttaagctttgttgtggcagtagttacagcactgttggctgagcattcattgttaacaaatcaacaacatatactaaatagggtgtctttaaacagaaacacacataaaagaaggttatatattcactggttggcaaaagcgttatggtcagaggctcgcagaaacaatttaatattgttcctaggagcaatggttcagtagttgttaacttatttgcagcaactttctaggacataactactgcaaataagaagagtctactatacttggaagtccccagggagcttttgggcagcagtaaactatggagaggagaatcccagagggtcccgtctgtgataagtggggaagagaaagtctgctcttaaatggtaatgagaggtgaagccggctgggcttctgggttgggtggggacttggagaattgtgtgtctagctaaaggattgtaaacgcaccaatcagtactctgtgtctagctaaaggtttgtaaatgcaccaatcagctgtctgtgtctagctaatcaggtaggggacttggagaacttttctgcctagctataggattgtaaacgcaccaatcagcactctgtgtctagctaaaggtttgtaaacacaccagtcagcactctgtgtctagctaatcgggtgggggacttggagaacttttctttctagctaaaggattgtaaatgcaccaatcagtgctctgtgtctagctaaaggtttgtaaatgcaccagtcagcatgctgtcagaacagaccaatcagcactctgtaaaatggaccaatgcgctctctttaaaatggaccaatcggcaggatatgggcggggccaaagaagggaaaaaaaagcaggccacctgcgccagcagcggcaacccctttgggtcgccttccatgctgtggaagctttgttcttttgctctttgcaataaatcttgctgctgctcactctttgggtctgtgccgcctttatgaggtgtaacactcaccgcgaaggtctgcagcttcattcctgaagtcaccgagaccaggaacccaccaggaggaatgaacaactccagacatgccgcctttatgaactgtaacactcaccgcgaaggtctgcagcttcactcttgaagtcagcgagaccacgaacccaccagaaggaagaaactctggacatgtccgaacatcagaaggaacaaactctggacacaccatctttaagaactgtaacactcactgtgagggtccatggcttcattcttgaagtcagcaagaccaagaacccaccaattccagacacattttggccacccagatgggaccatcgcccatcgccaggcggtgagactaatgcctattgccaaatggtgagtaccgtcggaccccttttgcttgctattctgtcctatttttccttagaattcgggggctaaatactgggcacctgttggccagttaaaagcgactagcgtggctgccagactaaagacacacgtgtcaggctttctgggaaagggctctctaacaatccctgactcttcggagttgggagcgttggtttgcctggaaccagcttctgcttttcctgtacttctgggctgagccgagggtcgacagagaggaaagccattcagctctgggatcccaacaacaagttggttgaccctgcagccatgagcagaactctcaaaggcatgtcgtccaagcagactcgcccatctatcctatctattctgacccttgccgcctgggtcctaatgcctgccagacaaacttcctctcgcctctcttctctgaggctagtcccacttctaaaaaaccactccctgtctctggtgcttttctagtttctcctataagaattatttctagtataaactccaggactctgttaccttctttaggtgcccgggctcaccaatcagaaagatgtaatttttgcccaaagccccattgtagggggactatctggaattttaggatccctcctcagacaatcaggcctaacaaaagctattcctgaagctaggatatggtgagcctcagaaattgtatccttcctattcatataagtgaggacaaaagacatcactcttccaactctggagatcccttccctccctcagggtacgaccctccacttcatttttcgggcataacatctttataggacatgggtaaggtcccaatactaacgggagaatgcttaagactctaacaggttttcgagaatgtgtcagtaagggccattaaatacaattttgctcagtcctctttgtggtctaggaggacaggcaagggtccaggttttcgagaatgtgtcaataaaggccactaaatctgaccttcttggtcctccttgtggtctgggaggaaaactagtgtttctgctgctgcatcagtgagtgcaactattctgatcagcagggtccagggaccgttgtgggttcttggggaggggttgtttctgctactgcattagtgagcacaactattccgatcagcagggtccagggacagttgtgggttcttggggagggggagaaacaaaccaaaaccatgggcggttttgtctttcagatggaaaacactgagacatcaacaggctcacccttgaaatacatcctaagccattgggaccaatttgacccacaaaccctgaaaaagaggtggctcatttttttcctgcactatggcctggccccatattctctctctgatggggaaaaatggccacctgagggaagtataaattacagtaagaaggaaaagctaaataatttctacagatcattcagtactgctcagtagtaccatgttggaattcacaggggaagtattataacttactgtgtttcaattcatttattttaaagccagaaactgccttgaaatggctgctataccaaaataccgcatccccaaaacctggtgaattctcagaaaaatcattctaggtgaagagaagccagtctatggtggacttgccttatatttcagcaccgatcccagtgtgattttatcataggctttcatcactaagaatgtggtgcagtctcttggagtacaaggacagcattagtaagaatctagaatacatttatgggaattggagaaattaaattttgacattcacttaatttttgtggtattctctttttgccacagagcatctctggaaagcacaagataatgcaggtttttgtcaatcgaatcacttttccctatatcccttattaataactgggatagtattctgaaacaagtactttgctttcaaatacattttagatttaacccataaacctaaaagtaaaataacagtatatttaaaaacacacatttactgaaatcttatacagttatagctatatagaatgcaggaggtcccggggtgctctgcagggaagctctgccagtcctagccagtccaccagacccagtcagcccctttcacctgaaggatccttgggggacatgggtaaagggattacctgggatggttcaggctgcatgaactcacagagatgtgcctgttcctcagggaccagatcttacactgtcagcctccttgacactttgatcagaccggactctctcttttcctatctgaaatgctgcagacctcagttctaataacttctgaggcatccctggccccaacaagccaggaaattccttagtgaaccagagcagaaatagccaccagatggcgcaaacacacagccattggctctcagccagtcccctgaactctggctgaccagctgctgggacattctgttacgttgcaaccctgcttataagcctgaaacgtttgaagttgtttaaagtttaaaggccaagacaggggttcttggggtctccttagagggctctaaagctttcatcaggacccggtaggaactagaagcattgttggatgtgcaactggcccccctattaaatgggatttgcctgatgttcatggcagatgggctttttcccaggacctgagtctcccaactctcattcccagttatttttccttactctgtcatgaaagtattttaagtagggcaagcaatttttgctttctgctttaacatggaaatataggaaagaatgcactggaaatggaaagtctatgaatgttggctgtaaaaacaataataatgtatttgggggttgaaagtactgtcccattattaaaatatgtgacagtaataacgtgaggagggcagggtagtaaagggagttaaagtgaaccagcattggtggggagttatgcaaagctgtatggggaagtttgatctgactcttgacatgtggttctcaggtaaatagaatcttttagaatcatttttcaattttttaaacagtagccatttctggagctgtatgttcagaggtactgttgagatttctgttttaatggtagggagcattcgagcctcttgagcattcttttctttttatctctaacttttctttcctcactcctaaaaatattaaggggaatttatttttatttgtattttttttttttttattgagacagagtctcactttgtcacccaggctggagtgcagtggtgcgatctcggctcaactgcctcctgggctccagctatcctaccacctcaggaccacaggcgctcaccaccaggcccagctatttttttgtatttgtggtagagacagcatttcaccatgttgcccaggctggtctcaaactcttgagctcaagcgacccacccgccttggcctcccaaggtgcttggattacaggtgtgagccatggcgcctggccataaaggggaattttaaaagggaagagaagcgaaagtgggtggcctatgaagctgctgatgggtcaagcaaaaactgtcagggagtttggttgcacacttcactgattggcaggtgggcatccttttcaggtggcccattcgtcacaggtgaagagaggattgccagcaccctgcctgtacatgttcagggttgcctctgtgctgtctttcttggatgcttttggtcaaatgacagagagaatggcatgcactgtcttcatgtttaattttatatgcagagttgtcttaaagttgtagctgctagttgggcacagtggctctctcctataatttcagcagtttgggaggcagaggagagaggatcacttgaggccaggagttcaagactagcctgggcaataaagtcacactcttgtctctacaaaaaaaaaaaaaaaattaattagcttggcctggtggcatgcgtctgtagtcccagctgcttgggaggctgaggcaggaggatctcttgagcccagaaggtcaaggctgcagcaagctatgattacatcactgaattccagcctgggcaacagagcgaaaccctatctgtctgtggggggataaaaaacaagttgtagctgcacatgtaggaaagaaaaggttagctttggaaagctctcttgaaaaactgaagaagatcaggtttatttcctgtcattgaaccaagtgaaccaagcacattaagtcatggggcagggcctctgcacagtgggctcttctcagataactcaaggtctcgtggggccatttccacttcagtgtagcatcatcatacttcctaggggtgcagagagatcaagaactcccacttagaatacttgcagatctttcttctgtgatccacctttgctgtcagctgcattgagaaaggacatccaaactggtgcagtggggcccctaaggacagtcctaacacaagctctctgtcactgtctcaggtgaagagttggcccatgttttgctcttgctgcaaggcatgtgctgttgccaccatttccatctgtttggtgactttcgtatgggatatgttactcccttcttcctactccggcatggggagggagcaaggaggagtacttattgctgggagtaatctaatttcagaagcacccatgacctgtggactccttctgaaaaggggatgcatgaataattgtacttttaaaactttgttttgttttgagacagggtcttgttcttttgcccaggctggagtgcagtggcatcatcatggctcactgcaacctccacctcccacctcagcctcccaaaatgctgggattacagatgtgggccaccatgttcagcccgttttcatatttttagaggaactattttaagggaaaaattttaaaaacaaatgacctatgattcattaccatgataatacttgaccttcgttcttcttactttttacggtaattaactttaactccagacacaatttctcaggaatggttattgaacaccaggtgaagagacaggtttcttccagtcctgtttttccaaactcctttcctatttagcacgcattgtggtgccttaggagggacatttgtgggcagttagggttgaatctgttctctggtccactagggggcgcgcctatcaaaggcatgtgtgtgagaaactctgcaggctgatggcacttcaataaagagcagctctgatgtgttcatgaagtggaggacttagtggggactcttctaagtgggtaagtttagcaggttcagaaaaatgcttttccagccagaatcttcctccttcccccttttagctcaaaatctccaataactctgtcccctggctgtggcggaaggagaggcaacatattaaacagtgtcaatccttcgtccctgagtgtattgtgcaaacttccttggcatcctttctttgcacatggcgctttggagcaaaagggcaccatccagcaggtgcaagggtgacacatagggaaccaagggcaaagaaacgtcagggtctcgtaatgtataagcaagtcaattgtgtttgaggctaataaaacatagcttttacgagtgcagcctttggtgccagactgcctggttttgcatcccagcttcattgctcattagctgtgtgatcttgaacaatttacctaagtgtttcttgcctcattagtgagttggatatagtcgtatctcccacccaggcttgttatggacattaatgagttaattgatgttaagttctgagaagccttggcatggagccagttttagtaagtttttacaattgatgattgtcatttggatctgatggtggaaatgagtctgcagaatgcatttacagtaacccagatgactggggacattcttcatttgactataaccagctgggtctgagagtagaaatacatggcttcaaaaacagttaattgtcaggagtggcatatcccaaagtccatgaattctagagaatttcgtaagagtgcttagcagtgcaggacttttatacccctcaaagagcctctttagtgaaggaagcggtggattttttgctctgtatttttgctactcaggaattagcatgtaggcacatggccgaggatgtccttatgctgcctgctcttgtgcagattttcaaaagcagataagactcaaaaccacaacatatattaaatcaatattactgtccatgacaggaagcatttttcaattggatgactccatccacgataccctttggagagtgccttggacctaggctggacagtgctaggacagaggaccaccagagtctggcagggctgagtggtgatggggtcctggtacctgggaaaggtagttataggcatccagcacctcttcctctgatgattttctgtaggtgcttgtactcgtgattttgcctctagtaggatcatatcaaagcacccctgagaatcatgctggttattctggggtgcaggcaagagagggaaggaatgaccagttaagagtcctgtgatccagttacctgcttcccattgacctgcttttgatggccatcaatcagctccacgcaaagctagcatgccttctatctttatcctttctcctgagacagtgtgctgttgtggtactttttattttgttttccattttttcaagtggtgactatttgtcacagtgcccttcctacctctgaattcagtgtgatgtgacctcgggagaggaggtgtgagcacgacgtccagactcggacatgtctgtttcacgtctgccgggaagtaatttttatgctgggagctggcttcatggcgtgggattctaattctggggatggcattttgtatgtgtaggaagactgtcaaaacctttccaatgggaagggacaagaaccaatttgagaatcacatggttacataagaactggccctgtgcgggcatctctgcatacttcctgcacttgttcattctgaagacgagagaaagaggagcaggaagaatcttccatgaactctgcaaacctacaaactttccaatgagaagtggtgcacactcccgagatggtgcttgggacaacatggttaaaagggtaaggggtatttattaaccctttgctttcttgttattcctgtccctcctctttaaatgtttacattaccaaactggctagactgctgagaatctatcatttttaggttgcctgctagggtttctactggtcttatcccagtaaatagctgcagaaaatagctgcagtggccacacccagcagcagtagtgtctaggggactctttgggacctgagccagaaagttcccatatgcagtatctcattctgtctccacaagacacaagacacaaggattattatgtctattttagagacgaataaaaagaggcttacagcttcagaagatttgaaacctgcccacaatagctgcagtgtttcagcagcacaaggagacatatgcagacttaatttttgttttcaagttgtttagtcgcaggttcagacactcatgggagcaaggcagtgaaatagatgaaagtagcagatcttagtgaagctttatttctagcctcccatgccaaggacaccccccactcccttggagtccttgagaaagccaccaaatgcttgtctcactgtggcctttccacactcaggatggtattcccactaatgaagaccacacaccaactatccacttgctgcttcttaagggaacatgcacagagcatcgtccttcctgaatctcaagctaaacccagcaggagcaaggccacgtttctatctgggggtagaaagcaaaattgtgcttccagttttccagggatgctataaatccttcgcaaatgctcacagcaagcaagtggcagggccagtgtttggcccctttcaccctgacgccagtcctcccccacctcagcctcgaggctgtgctgtcttgctatttaaggaaaagggaacatgctgtctacaaggtctcagtcgctctttacattcaattcaggtaaatccaagaggccttgtctccattctcagcttattgagcctctgcctgccttcttgatgttgttcatttgttgatgaccttgcttcataaccagggcaaagcagtgagggaaagcaagtattttcatgacaggtcctgagtgctcatcttcctgcttcatgataacccagaaatcggccttcactttttgccttctattgttcatagatggagcctgaagttagcagatttgaatttggttctctccatccccccagccctttaatatatttatctgtgatgtcatatactaaagcttttccttgtttcttgaagggttctccctcattcccactgcagccttccctgtgacttatgagcattagggcaaagggaaagggctggaaaatggagaccaggaagagggaggcctctgcagtacagcttttaaagttcaggggcatctactggaggtggtccgtctgggaccaggtctgttaggagaagagccacgccagctttttcggagaggaaagctctgggaggaggtacagttcttcctcactttgggaaagcatcacagattcctgcaactgctgctcagtgcagggagccccgcctccagccagctgggcatggctgggcatccaaacaggcatccaaggtgtgagacaggggcctgtggatttcttccatctatctgagtggctcactgtagaatggcgtcccatcggtcacctgtagagcactttgatagtaacggatcatgccaggcaatagggtcatgttggagtttaatctagactaaaaataagagactaatgtgttgattcatttgttcgtgcaaccaacatttatgagcatttatgatatttaaggcagtgtgcggacaggcctctctctagtcacaaagatgaatcggagaagccaaggccttcatggaattgattgttgagtgaactccttatcactctggacctcatgtgtgctgttctctctcctggcactctcatcccctgtcctctacaattctcagttcagaactgagtgtgttgtattcttagactagacacagggagcctgctgggagctctcccagtccaggtcctacccccgtttcagcacgtagtttgtacttgcttattagcctgatgtcccaccagagggataggtccttgtctacttagcacacctttgcatctcttgcacccagcacagttcctgccactggataggcatatggtaagtgtgtgttgaatgaatgaatgaatagatcaattaaggattctaccgttcaagaaaggagacacctttacttataggtagaagttgatatatgctatgagaatcatacaaatagactataaagtgtttctgaaattccaaaaatggataaggagaatttatttgaggactccatgagattttacagtggagaggacgctgaagatgaaccttaaagaatagggagcatttggacatgagtgagctggggaggaggaggagcgtgggtgaccaacaaggagtggaaagtggaagaatgtgaagtttccttcaatttctgctcctttgaggctgggccataaaatattatgtgctgcggtgtttggatgatatttgataatttgtaagttaagaaataatgcagttaaagctgaggatttcacttcggtggtagtaaaaagatggcaggaagttggaagaggctggaggtgatattggccgaaactagaaatagaaggggaatagaaagggagaaaacaaatgtgaaagaaaaggtgtggagcacagggcttggtaacagattggatatggggagtgttgcacagcttgtgtggccgggaagctgggttgctctttctgcagataggagatgcagctttgggaaggggctggtttgttccatttaggataaaggacatttgaattactgtcaggacttttcagctggagatagccagaaggccaatggaaatacaaatacctagcacaagttaacatttgcttgagatttacagtaacctggcaagtgttttgttagcctattttaatgaaaggggagctgggaaactatagagcagagaataaactggccaggacatacatcgagtgtgtgacacatgggactccagtcttcatgtgtcaagttctgtgcttgttctggagaatttctccaggagagccagggctttccagagcattctggatgagaagtgccagtgagatgtatttagagggacaagttgctgaggcagcaccgggtgagatcatttgctgaagcctagagtgggttcttctctaagtgtgtactagagtcacatgtttatgtgtatgtacatgtattacatgtgtgtgcacaagtgtgtgtgcatgtgtgtgctcatctgccagcaggagagaaaatggtgataagagaaaactggaaagaggatggcccgccacgcagggactctgatttgtttgtaagagctgggaaacacaattgatactcttcccgtagcaggccattggtgcagtcctattttcgccgtttcctagtgactcacactgtatagatagtgctgccttatttttagtgctgagtatgagtgtgctgcggaaggctgccggttaccaaggaggctgtgcctctaagctcctgcagggagccccccgagtggtgactccagcctccgtgtcactctctgataacccctggcagagcacctccttaacccgaggggtgaccgctctgggctgccttccctccatccctgcttatataacggctttttgttcttattcagtttacgtgttagaaaaaattacctccatcttaaaggagagttctgggaaaatgttaggcagatcatagagagccagggggccttggttggatacaatcactgtgcgggttgggctgcgtagccccacctggtacaggggttttgagtcagcttggcctctttgagcctcccccctcaccaagaatccaggggggaagtggtcaaagtactcaggaagtcctcagaattttttactttacaaggtaatacaaacccagcgaaggggtaattatcaggttgaattcttcagatccctcacaaaaattccatttttgggtctgagcacacatctgcaatgttttgttttgtattttgatttcatgaactttttctttccactctttaaatgtgtgtgtgtgtatatatatatatatatatatatatatatatatatatatctcctatatatataaaaaatatatatgtatctatatataaattatatataatatataaaatatatgtatctatagataaatatatatcatatataaacatgtatgtatctatatataaatatatatgtcatatatacatatatacacacacacacatttttttttttttttttgagacagagtctcgttttgtcacccaggctggagtgcggtggtgcaatcctggctcactgcaacctctgcctcccaggctcaagctatcctcccaccttagccttctgagtagctgggattacaggaatgcaccaccatgcctggctaatttttgtagtttttgtggagatggggcttctccatgttgcccaggctggctcgaactcctgaccttaagtgagctgcctgccttggcctcccaaattgctggattataggtgtgaaccactgcgcccggcccagtttttttttttttttttgagatggagtcttgctctgttgccaggctggatggagttcagtggcacggtcttggctcactgcaacctcctcctcccgggttcaagcgattctactgcctcagcctcccgagtagctgggactacaggcatgcaccaccacatccagcgaatttttgtatttttagcagagacgggatttcaccatgttgaccaagatggtctcgatctcttgacttcatgatccacctgccttggcctcccaaagtgctgggattacagccatgagcaaccacacctggccctggctctggcccactttttaccagtatttatttctgctaatcaatgtgacacatccctatggtgaaaacttgggagaggaaattgtggaaaacacacacacgagaaatcactcatagtcccaccttccacaggcaaacactgctactgttagcatctttcttcttcttctgtgaactctgtcctttacacagtggagactgacctctatgtttgatttcctaacatttccatgtgtcctcagtacacctggataaacatcacgtgcagaagccagataacattttgtgtgtgtgtgtgtgatggagtcttcctctttcgcccaggcggtagtcactggtgcgatcttggctcactgcaacctccttctcccgggttcatggaattctcctggctcagcctcctgagtagctgggattacaggttcgtgccaccatgcccagctaatttttgtatttttagcagagacgggttttgaccatgttggccaggatggtcttgatctcctgacctcatgatccacttgccctggcctcccaaagtgctgggattacaggcttgagccaccgtgcccggccgatgccagataacattttattaagtggttgaaccaaaatttatctaaacattctcctatatatttatgattttttttacaagaaggggttccatgaacatatgtgagtaactgtttgtccacattgaggattatttccttagaacagattgttagattcttgggtcggtcaaaatataagaacatttttgacacaattatttttgatatttatttgtaccttctatttttaagtacttccttgtttccatgaggtagatttttgtttgttttttctaactactttgatttagttgggcttaccacagagaattcagaaatgtaggtaatcagaatcatttacataaaaatcagccatatttctatatatgtaaataaaacattgttatagttttgtagttttgatgtatatctttccagatattttctttcttttttttttttttttttgagacagagtcttgctctgttacccaggctggagtgcagtggcgcggtctcggctcactgcaagctccacctcccgagttcatgccattctcctgcctcagcctcctgagtagctgggaccacaggcgcccaccaccacacccggctaattttttgtatttttagtagagatggggtttcaccgtgttagccgggatggtctctatctccttgacctcatgatccacccgcctctgcctcccaaagtgctgggattacaggcttgagccaccgtgcctggcctttccagatattttctatgcttgtataagtaagtatgctttcatgaaaatgtgatcatataggtttttgaaatttttttcaaaatgaatttttaaaagaaaatttctggttgggtgcagtggctcacgcctgtaaacccagcactttgggaggctgatgtgggcagatcacctgaggtcaggagtttgacaccagcctggccaacatggtgaaacttcatctctactaaaaatacaaaagttagccgggcgtgattggcagggtgcccgtaatcccagctactcgagaggctaaggcaggagaatcacttgaaccctggaggcagaggttgcagtgagccaagatcacgctatggcactctagcctgggtgacagagtgagactttgtctctaaataaataaataaaaaagataacatttccatgtgaaaacctagaataggatagtttatgatgtcatcttagtatatgcttagcttcatctgatagaccgtaatgaaagattttctttcttcatgttttaggtacaaaacttagattaaaaaacatatccctgtagaaagcatgttgagacttctctccacattagtctgggattattaaataattattactattaataccatggagatgaacatacatgcaacctgcagaacaaatgaaacgtgttgctctgaagcaaagtaattttttaataattagtagcctatcagcataatgttcattttatgtcttcctaaactttttatcacttgcattgtggtttataaatattgacctactgataaagagcctttgctgctgttctttcgttcagtataagaatttctgctaaatatcatttcttcttcctttttttttttttttggtagggacaaaacgataaaatgtctctagaaatctgatttggcatggtttgtagagagattcatagtccaggattgtttaaccacacagagtcttcagggttttctagaggtttacattctgatgcatccataaaaaccaactgataatgtcattttttagataaaaatgtagtatgatagtattttattcagcattgtggcttgggactgacataggctttataaattatcgtatgatgtggtgaataggtacttgatttgttccacaaaaatctgctgccatttattttgtttttttgtttttcaagttttggcaacaacttattatgcaagattccctgaattcttccctggaaatgtgtctctcattcttttgggagatcattgcttaagctaggtaacaatctgatttcacggagagagttagaactcatgtctttgaataaccacggttacatacccatgtagccgcaagagagtgggcttctctccttcccagaggtcttgatgttcattatctctgcccttgggttgccataaacttccctgtgtctttcttcagttatatagcatatgttatatacactcatttttcattagcttcagagttcaagcaaatgtcttctttgcataattcactgggatatccttcggaatgccttacagaaaccagtgtttctcaaaaggattcatttcttccctgctcatgttcacattagaatctccatctgttgatggaggctgaaagtctgattcttctaaggatgtatgttatgcctgcactgtctgtccatcatatacagttttttaattccttttgtcccatggcaatgcagtttgaatctttcatgtacataaacattcaaacatcatgattaaaagtatggtgttccatacacaattaccgaattcttttaaacaatttcttatttttgaatgtatatgttgttaccagtttaaaaattattatatacagtgccacagcaaatacacctacagcttaatcactagaagcacagttccttggttcaggattgggcatattttataacataaatataattcagcaggaggactaaaacagttattgtcaaaaagttaatgaaaatctcagaaacacatgaactgagctgcagcaatgatgaaacttgtctttactgcatattctcatagaagctcctcatggaaggctcagtcatggggttgactgtgggggacacatccaggcatttcataccctaaaccccagcaagatttagtggtcgttgggttgtgtttttaaagatttccatgcatattacaaaatattccagaaccagtgacaatttataccattaccattagtcttagaaagtggctgtttctaacgcctaggccgtttcataactctaaagattttcttttatctttactaattttatggttttaaaaaaaactcttaagatgccttttctctaaatacccacagccacatttcctatctccctattatagtcttctcttgctcttagttattattattattattattattattttttttttttttttacctttctccagtggcctgtgtgtgtgtgtgtttgcgtgtgtgtgtgtgtgtgtgtgtgtgtgtgtgtgtgtgtgtgtaacaagaagcacagtctgtatgttaagcactagcccccactttgaataaacactgtaaggtacaacttcatgtaatgaaggatagtggagtaatccagttctgcaaaaacatctcatcagtaagtgtcatttggaacctaaggactggggctctgttttctgcagctcttcttgattggttttggtcaaatcattattttttgaacctcagctaatttatttgcagagtggtgatggtgcttttaaactcctctctttaaaaagttattagagatcaagaagatgtagtgtgtgaagtttgtaatttctgaaccgcggtaaaagtgattatgattgccattgaagacaagattttaatgcacccccacccccctgcttttttttaaactctgtgaatgaagattcttgtcacaaggtaatagaaatgattagacaaaggaaacctactggcattgactaactggagtcctttagatgccccagtttgggctgggatagaaatttctagaaatgggatattcagggagttcccttgaagaatggccttgtgtcgttatttttttaaaaactgtgctgtctcagtcactgtgaattcaagtgcttaacagtttttagtctacacaaaaattagctaaggcaattctttaattgaaatagtcaaattatcacatttcagtgcacctgcggccttgtatatacagtaatacagtttactacagtttacctgcatggtcatttttctttactatcagaattcatttggagtagatgactgataataaaaaactggttatagtaatatctatagtaaacaaagttattaaatgctgtacactaaaagcataatatgttattagaagaatggggtgaattgggaagttttatttaatcacttttacaaaatttgtaaaactgagaacataactcatattttaacagttttattgatgtataatttatagaccatataattcactcatctaaaatgtacagtttgggtgcttttagtatgtttacagggttgtaaagccatcaccaaagtcaattttagagcattttcattatcccaacaagacccattagctgtcaccccaatctgttcgtcctccccagccccaggcaaccaattagtctacgttgtctatagatttgtctatcctggatgtttcatataaatgaaatcatacaatacatagtcttttgttactggcttctttcacttagcatggtgttttcaagtttcatctatgtagtctcatgtatccgttctttgtttcttcttattgtctgattttattctctcatacacacacatcccacattttatttatctgtttatcagttgatgagcatttgggttgtttctagttttagttatgatgactaaagctgctatgaacacttctgtataagtttttgtgtgggtgtatgtttgcatttctctttgttctgtacttaaaagcacactgattgtatcacatactgactctatgtttaaccatttgaggaaatgccagacttttccaaagtgcttgcaccaatgtatatgctcaccagtagcttatgaagatttcagtgttttcaggtcctcatcaacacttgttattatctgactttttgctgatgggagggaatgggagggaagtggtatctcattgtggtattgagttgcatttaccagatggctaataatatttgagcatcttttcttgtgcttattggtcatttttataacttctttggggaaatgtctgttcagatcctttgcttgtttgttaattgggctgttcatcttttaatcattgagttgtaatagttctgtatgttctagatacaagtccttatcagacatgatttgcaacttctcacattctgtggattgccttcccactttcttgagagtgtcttttgaagcgtgaaagtttttaaatttgatttttattttgatatatatctagtttgttttttatttttattgcttatgcctttggtgtcataactaagaaatcattgttcaattccaggtcatgaagatgtatacctacattttcttctaatagttttataattttcacccttatatttagttctttgatccattttgagttaattgtgtatggcataaggaaggggtccaacttcatttttgcatgtggatatctagttttcctagcattatttgctgaaaactgttctctcttcattgaattttcttgacacttttgtcaaaaatcaattgactataaatgtgaaggcttatttctggattcttaatcctgttccattgctatatgtttattcttatgtcaagtccacgctgtcttgattatggaaactttgtagtaagttttgaaatcagaaagtgtgtgtcctccaaatttgttagttttcaagattattttggctatggagggtgtcttgaatttccacatgaatttcaggattgtcttgttgatttctacgcagaagtcagcggagttactgatagggattgtattgaatctgtagatcaatttaggaggagcattgccatcccagcttaacaagataaagccttctaattcatgaacatgggatacccattgatttatttaggtcatctttaatttctttctacagtgttgtgtagcagttttcagaatataaattttgtactttatcttttaaatttattcctatttcattcttttgtatgctattataagtagacctatataaatgatccctaagaagagtacttcaaattttctggatcaaaaatcttgtctggcttgagccatgtaaccatgttggcacaatcagtcacatctagggttatgtggtccttccacgttatatatatggtatgtatatatatacagtgctgtttctccaacaaaagcttgaatctagggtgatctgagtgggtttaccatgcccactacaagcccctgcccagaaagtggacctttgtttggaactcagttatcacataaatactcatttattattttttcaggactattcatttactttatgaaaattaaaatacaatgttatttttaacaagtagtaaatggaaagaatgagtaatattaaagctttcatttctataaatgatactacttagacctccctattaaatattctgggctcagtatcaaattctattgtaatatctttgaaaagcatagaagcagtttctaatttaaaactctagctagctgctgctctgctaagaataaagattgaccacaaattcaacttaatctgtcgatcctttgcatttaggctatcatatttgattcagaataactccgctctttaagacagtttttaatgacgtgatgagagaggaaatgcaaaatattttacattagcctatactctatttgtccgtctagttataatagacagactcattataaattatgacttcctatttcatagatatgaagattagtcaaatatgtagaacaagagaaaaaaggatagcaatgaagtaattcgtgatggacttttttttttcttttgagacggggtctcactttttgtcccagctggcgtgcagtggcatgatcatggcttactgcagactcaccttcctggggtcaagtgatcctcccacctcagcctcctgagtaacatgccaccacaccagggctaatttttgtcttttttggggggtagagatggggttttgctatattacccaggccaatctcaaactcccaggctcaagtgatctgcccacctctgccttccaaagtgctaggattataggtgtgagccatcatgccatgacggacttcataaacatagtaaaaggtttcagccaaagcagtttgatttaaatggatgttttaatccttggcttgcaataattttatcctctggaaagtatggcttttcagtcaacgtattcacttttggccttgaccgtgtagagcaattacaggagcccatatcaacaagtgtcttcagttgttgcattagtgcctggagccagaacacaaaggtagccagagagggtgcccctaaaccgtgtctccccacatctctgactctgaaccacacatgcatggagcctactcaaagcaacctagctatggacagaagatctcactaagaccagacttgtagccctggaaacagtttgcagtttgtgcacagacaagagaactatctgctaaaacaaaggaagcaacactcattggagaaaaaacagaatccagaatcttcaccacctaacattcataatatctggaaaagaatccaaaattcccagatcatggagaatgaggacaaaagaaaatcaactccagctctcagatgaaccagatgttgaaactaacagacaaaaggttcaaaacgactgtgataactatccccaatgagaaaaacaaaccatgttttcaatgaatgagaatcttagcagagaaattagaggtgttggtagagaaatggaaaacagtaggaagcaaccaaatggaaattctagaaacaaaaaataaaatttctgaagttgtatgtaacaatatataatagatcttttataaatgtaagctattattattatataagggtaaagataaggtattttgcctttattttattatacgtttaccagtgaaatcgaagcagataggacaattctatccaccttttcatcttctaaaccttattctctttggccttgagaaaaaaaaagtctggaatatacttagtgaagtgagaaagttgagggaggtgggggacatagactatggcccttccctctttcctgctacttctgtcctgctgtgagcacatctgtgctgttgtgctttatagagaaaattccagtttacctccctatttctctctctctcttctgggtcctgagtaacaggaggtcagcttttctaggcctttcttatctcttcccctgataaaagttggattcatgtgtagtgcacgaacaaataaagctttggggctctggttccctcctcttctccccctgcctcttcctcctcattgtcacatccttattgtaaatactttaggggcagtgtataaaaaatggcactaattactgaaacaatgttatttaccacatacactggcagaatgtttactatgtttctttacagccggggtttatttttgtttgatgtatttagttgctgtgaaaatgaacgtgttgctcactctcgatagacctgttcttcctcctccttcctccttctccttctgtgccagatcgtcctcctcttcagcagcttctcttccttcattaggccttctgggcagtttttaggatgtctgctcctaaactatttccatttaaaattgttctagtgtatcaacacaccaatcactttgactccatgcaagctggtctctgcatttcaaacctagcttccgtgtgttagtcctttttgacatttttatagggtttctccaggaaaaaaaagaagagcatagcaaaggtatgagccatccttatggagtgccagcctagagggaaagaggaactaaacattgtttgtatacttaccacctatgagggcccctccaccatgtttgacacactcttcttgcagctaactggtgaaatagatgttttgtccctggttttatatctaaaaatactatactgaggttaagtaacctgcccagagtctcacacggggtaagaagggacaccagaattcagtgataattgtatcattcccaagcctcttggctttttaaatttatttactctaaaccatactgcacctctctaagtaaaaggttaagagaactcaggaatgcaaatgaaaaagcgcttgtcaagggagagagaagagagagaggagggggagggagagagagagagaaagagagaaagaaggagagcgagaccgatcgtgccattgcactccagcgtgggcaaccaagcgagactccgtctcaaaaaaaaaaaaaaaaaaaaaaaaaagtagagcacaagagcactcatgatcttcctatgttgtcatttttagcctttttccaccttatatgtgctgagagctgttctgctgccattttctctccctgcctcaagagcacatttaagtgcaagtgaatggggtgggattgtgattgttacactgagtgattgcttagaatctgccctaccgtatctgccggtgtataaaactctaccgatgttaccaaactctgagaggatgtgaagctctagttttcactgtgctgagctgattacctcatgtcgtcaccagggggcagcaccttcccatgcctttggacttaggagcctcggggcggtgggaagcccacaccaaaccccatgccttagctggtcacctcttaccttccaagcctgatccaagtttgggcaaaacggatgtaaatgtgtttttaattttttttttcttatttgagaggggggcaattggagggaggaaatacagcttatatgttggcatacacatttgaaatatttggtactttctaagcaggagttttatgtgtattctgtgttcttttctctactgagaaaataactatttcctttgctagggatgcagtaatcagcaatgcctgttgcaaccataagttacaccatattttctcaaagaaacatggtagtaatcagaggccattgttcaaagtactgactttagtcagctgacctgcaatcaaacctcagtttaggcacttactagctgtgtgaccctgggcaaaatacttaacctctctgagcatcacatactcatctgtgatatgaggactgcaatacattcctgctttctttttttgacaaatatttattgagaatttctttacttgtggaatgtggtattatgtcctgtgtttaatggtctttatatgtatctcccagttcagtttcatataaattggcctcttgtttctgtaactaggattgcatttctgtcaaaagtcttggcttatacaaggacgctcaaaggccatccaatctgcaaatacaagacagagctgcctcaggaaatgcccgatgatttaattaaaatgtgaagagtagcccacagagagggcaggtgtggtgtaaccccaccctgcagggatgaggcgggcatcctccttctcggtgacttagcctggagtactaccttggagtagtttcagagacggttctcaggacaaaaagttgacccctgttttagggaggctgccttgtggccactgggcatgctgatggtttgccatctaacactttatgcctctcacttgtccccattttgagtccaggcaactgtgacccctggaattatggagagtctcttgggactgtcgttattatttttattcttactgaggtaaaattcacataacataaaattaagcatgttaaagtagacatttcatttagtacatttataatattgcacaatcacccactatctagttccaaaaatcatttttttgagtttctattttgatatgattttaacctaggaaaaaaattacaagaattgtacaaggaactctgcataaccttccaccagatatattcactgttgatgttttgcctcatttcctccctggtgtttgctttctctctttctctgtttgcgtgtgcatgtgtgtgtgtgtgtgtgtgcgcatatgtgtgtgcatatgtgcatatgtgtgtgtgtatatatacatatttttccccaaaaaaacactttagagcatgctggagacattgtgtccctttagcactaaatacttagtaggtacgtatttgctaatatggccctattgtacaattataaaaacctgaaaatgtaacattcatacaattctattgtctaatccacagtcatgactcaaaattcatcaaatttcctttacacttattctttcctagacgaggatgcagtcctccatcctgtgcggatttagctgtctttctttttgctctcctttgatctggaatagtgctttgcctttctgtgtgttctttgaccttgacatttctaggagaatacagaccatggttttgtgcatcatctctctcaatttggatttggctaatgcttttcatgattagattcaagttcttatatatcatctccctcccaagggaaaatgggtcctgatttccacatgctaaacttaggagcattgattatcctattacccctacaaaaaccagtgatggcacggagacggcatttttcagccttacattgtaaagctgtcccaattctgtgggctatagtgatatgagggtcagtttcctgaagaccatggaaaatctgctgctattcctttagtttcgggcatcatagaatgggaggtttatggcttcaagactggaagatggtgatgcagaagcacattgtgcagccctttgggttaaaaatcattctttcatattgtgtggcaaaatggaatttgctttatgttcattcacttgtcagatgctgagtgagaaaatgacaatttacaatgtaaattcttaagataattaagtcagtcttctatggcatggtgaaaaattccccaggctgcctactgggctcctgcacactttgcctagaaggatgaattcttctctttacctcgctgtgtaacttccctctgccaagcaaaagcacctcgctaccttgagaataaattgacaatctcaattttgatatgttgctgatttcttttgtgtacatgattattaatgtacagcttatcttagcagcagatccaaggaagtgattctttctttctactgtttccatgtagccagccttgcccaagtctttgttcctctttccccattcacatgtatttgataattcagcttttcctaaaatattttgccttttgtttttaaagttgaaagagctatatgcaaggccgggctcggtggctcacgcctgtaatcccagcactttgggaggccgaggcaggcggatcacaaggtcaggaggtcgagaccagcctgggcaacatagtgaaatcctgtctctactaaaaatacaaaaaattagccggtcgtggtggcgggcccctgtaatcacagatactcgggaggctgaggtgggagaatcacttgaaccctggaggcggaggttgcagtgagccaagatcgcgccagtgcactccagcctgggtgacagtgtgagactccgtctcaaaaaaaaaaaaaaaagagctatatgcaaacattcagattaaatttggattacttttaagccacatgaacaaaattcccctcgccagtctgttccctctaagaaaaaaattatctgttgcctttttttcttaagctatctatttggaaataatttggggttgactgaactgtcgcagccatagtacagagtgttaccctgttccctttacctagcttccggcaatgctaatatcatacacattatgtcttacacaaagtatatttatcaaaaccaaatattaacagtgtgtgatcctgttaaccaaacagcagagtgttttaggatttcaccaggtttttccctgatgtccttttctttcctcagatcccaggtagcatttagttatagtctcattcaacctgcgacagcttctcagtctttccttatttttaatggccttgatatttcctagcaagtctggtcatgtgttttgtagactgttcttcagtttgggtttgtctcatatttctcatgattagactggggttataggtttttggagagaaacttacagaggcaaggtgccttgccacctcgtatgaggaggtacgtctctcctgacttttacaatttttattctctactattgtgtggttttaaatatctttctatggtgctaatactgttttttttctaattaaaaaaatttttttgagacagggtctggctttgttgcccaggctggagtgcagtggtgtgatctcagcttactgcaacctctgcctcctgggctcaggcgatcctcccacctcagcctcctgagtagctgggactacaggcgccaccatgcctggctaattttttctttttttttttttttgaagagatggggaattgtagctcccatgactcccgtgtgttgtgggaacaactcagtgggagataattgaatcatgggggcagtttctcccatgctattctcgtggtagtgaataagtcttacaagatctgatggttttgtaagacgtttcccctttgcttggttcttattctctccttgcctgttgtagtgtaagacatgcctttgaccttccgccatgattgtgaggcctccccagccacgtggcactgtgagtccattaaacctctttttctttatgaattacccagtctcgggtatgtctttatcagcagcatgaaaacggactaacatactgctaatccctcccagaaacacactcacagacacaccgagataatgcttcaccagctatctgggtgttccttggcccaggcaagttgacatgtacaattaaccatcacaggaagttccccagtgcctaactccctcctgaatcatgcattggctgtcttgagtttgggggaggggcatttatttggtttgatggatctgtggatattttagaaagctgatttcaatctataaagtaaacctccccttcaaatacaaagagtaacatagatacagattttatctaatttcccttcactgatgacctctctaggtcccagtatataccacatagtaagcagtgagtcaaggaaaagaagggccagagtaatccacaaaccttaatcaatccatgaccacccagcagctggagcaatcactctctagctttctctcattaggtacacactaaattagaaatctttaagtagtgtcctcttgaacacagagtgacaggaatgaaatgcgacacataacagaggaaaacaaatacaaatagttttcaaaataaagtcagtctttagaaggaaggtcacttttgtttatttcctaagatttaattcaaattattctcagaatacattttaaattattgtgctgtaacttgaatattactaattactatgcttccaattggggaaaacaaagaaatttaattagctctgaagtttgagaactattgaaagaagcactattcccatgccacttctttgtactttcttgtgctcatgatgtttttaattgctagtatattttgctttatgtgtgaatgtgtttggcaaccattgacacagagtggagtatcatgagttttacaagccactcatagcagaaagttttcttgacagggcacagaaaatgaaatctcagatttgctttatctgacaatcttctgctagaacatgctatgtttagagttctcattctgagagtgtctaattggaaaggtggtcttctttaattccttgaagctcttaatttcagttccactggaaactcttcttcccaccttttatctagtttgtaacatacaatgtccatttctgctgggtcacttttcccactggaagatacatctacagtccttcctaagcatttttaatggctacaccatatccgtacttaggcattgagctgtgtcttccatattggtctatgccagtattgtctgacgttgattatatagtcgtctaaaagctataactgtgttttccttttcccttctttactttgtcttctaacttttgtttactgcaaccaatatcagcataaaagtaatagagaaataaaagaaaatgtgttccatgtttccatgacagtgcatccgttagttatttttgtttcctgtttgcttccagtttttggtcattttgtaaatggtcaaataattgtaataggagggaaaagattattctatgttttacttgaagcattatctcacaagcactttttcatattgttataccacaattacttttatggctgttcattccattgggttgatgcattgtatatattttgatatttttaagtactggacattcaatgttctagtatttttgtaagcaatattatattgtacatttttattcttacagctttctgtttccttttcagttatctcactgcgatagaccaaaatatttggagactttcatggtcgttaggctatatgttgctttttgttttgttttatttgtgactatttttagcacattgtcatttataagaaagtactttgtcaatgcatagggaggaggtgacaataaggaagcagtccttttctttgaaagtattgttaggattctgaggaagcttttctaggaaatgacagtgaaagtataacagtcgatgagtctttggggagcttgggaaattgttgagatgttaaaggtcattctgaaattaatttgcctagcccattgtaggctatactgaaattattatctctagtaaatgacagcatattctcagctatatccaaagactgttgtagaaccagccacgatctcctgtatatcattccaaacatcacttgaaagttctttcttgtgtctaatctgaatcctatgctgctgtgaaaatcattttcaggtattgcagttcaacttggaactaaaagtaactatgttcttatacactgagaacagagacactgtccattctaaagtgatcatgagtcgtttgttggttttgttttgttttgttttttctttgagacagaatctcactctgtcgcccaggctggagtgcagtggtacaatctcggctcactgcaacctccgcctcctgggttcaagtgattctggtgcctcagcctcccgagtagctgggattacaggcgtgcaccaccacgcccagctaattttttgtatgtttagtagagacaaggtttcaccatgtttcccaggctggtctcgaactcctgagctcaggcaatctgcctgccttggcctcccaaagtgctaggattacaggcatgagccacagtgcccagcctgttgggttttgagttgggcatggggaagagtgaaagccaagtgtccccagagggttaagaaacctgttggaaggtgaccctgggtgtaactccatggtgggccgcccgtctcaactgctgtttggtttcagctgtcctaaggggaggactgactctgcagcctgacaatactttctgtgatgtgttactattggcatgccgttccaactggacattgaaaatttgcagacaaatgtagagatttggtagtgactaatttgcattgcacaaggtgttggtagtagtgaacagcttgctatgaagcccgtattcaaaatttggaaggaacaaacactatggatatgctcatctcaccaaactacccaacctatttttctttcactccttttctttgtctccttattattctgctgatcattttctctttgcagtgtttcaaatgctgtttctcttttcttttcccgccttccttttttcccttccactccttttttctatatcacctttctctctgccccctccactttatctcgggtcccacttcgccattgattttttaccattcttaacccctttcctcttttattgagaaaataggctttaaatttggagtgtgctaagaaaatgtcgctttatgctgaaaaactgcaggattcagggactgcatttgtggtgtggcttattgatagaagagaggctatgaaagctagtgcttacaagtgatttaaaggtgacggctcagtgtctcaggtggacgtgattatattgtgggacagctgggttccattttagcttgatattgacctctccttgccatgtaattaacagtgtgccagccacagatcataaagtgagtgccgttcaatgaataacatcatgtactggtgcctggagtttgttgtacccatgggacctagtgggcatggggcatgcctggatatctagccaggagtgacacttaagctcaattgctggatgctggattacaagagctctgacatgcatcctcagatagcccgctcgatacagatggctgatgagttctgaagcttcatgctgatgtgtccaggagcccaggggcaaactgaccctttcctctttaggcacaatgcctgcgtcggctgtttagaaatcatcagaaaacattttaatcttagggggctcgatttttggtgattaaactagacccctaaatagagttctctaaaccccaaacacaatgaacagagattcatagtgaagtaggtttgcctccgtgaatgagtgttgcagtgaatctcgtccttttcttggctttggtgttgtgtagtgattaacaaaaacgtgagatgaccgctgggcatctttataggaaaaaggaagtgggagggtattaagcatagaatggatgctctcatttgcttgagatgtgtaaaataagttggggtagaatggggaagggcagaagactaaagatttaagccccccagtcatggtttcatttaatacgttaaggaatttgatgaggtaattgggcagattcaaggcaaagagagagcagggctgagtatcagtgatcttcagataatcactaaggtattattcaggacacaagccagatgacgttagcttcaccagaagatgggctgatgtggccatggattcagttagtaattcttggaattgctggggcttggggcagccaccaccatgtggtttatctttgtctaacctcactaaagccagccgagcagacactgtctgtttggggctttcaggtttggggtggtggttctcagtagaggctgaagaggaaagagagaccttttaaaaagaaaatatttcttttctcttctctatataagttttgagcttaacaggctttgatcaagaagaatttcaccttgggtttctgttttgagttacatctcctcaagacgctgccatggggctggaggagaaggtcagagagagggaaaacttggactgtgctgaaacccctttaggctcacttatttagttattcactcagaaacagcagcatggactaggagctatctgtgcttttgcaatgtagcttcactacttaatttgaaataaattcccttataataggtccaatgtataatccgaggcagatttgaaataacattcaaagagtttttggccatctactccattgcttccttccatcagtggggatctctgtgacgtggcttgtactccctcaatggtcctttttcttggaacctcacatggtcactttgggccagaagatggtatagcatgaataagaagaggtggcctgcagtcctaggtgctggtccatactggccaggacagagaatacaggatatcacatagtctctaaatacaatttcaaagagtgcatctctagagttaagtgagtttgccttaaattctgtgcagttgcagatgatgtaatccatttataaacattttattaggcagattaaattaagatacaggaaatgctatttcacatttcgttgaagaggaaagtcaagtcttgtgaacgttgtttactataacagaaggttcttacatatccatctcaactcaattttcttattgtttcaggatccgagttccctgctgacttctactccttgcacagtaaaaagtcaatctgctaggagcttgctgagatgagtaagagccgtctgctagttaagggaaatttggactcaatgaaaatagtcaatggaaacctctgtttgctgtatcaagcatgcagtacttatacccgtacatggaacaaatttttttttagcttcaatgttgtaaggaagatagcaattttccttctcagcgtaacatataaatgtactacttggaaatcgagtagttggcttgagttctagttctggtattgtcggcaatgtactcgcctaagacaagccctttgaccactatctatagactctaatatcctaatcaaggttattagtaccttctgatagtagcttagctcctccatttacagcaaatcttactttttctgcattcagctgatgaagtctatgaaagaatagcaggaataataagctagttttggtgttttggccttttggataggaatgcagggaggaaatgaaatgaaggatgtcttgaaatgtctcacttagactttcttatgttcagagaaatacagagagaacatttcctagatattgagggtaaatttctcttcttgaactatcttaagtgcctcagaagaggacttcagtttgagatgacttttttttttttttaatgtaagcacagacaattctctctccaccctcaaccctttacacaatttctgagaacagcgattttcaacgaaggggaggaacagaaatgaagttgacaagagaagccatctaaaattaaaactctccatatggaattgctttttcttttcctccagagagtgtactcactctaagtcagctctgtctttgaacattttcttacaggatagtcattggaggctctgataactcctagcttctattattgtccagcttgtatcttttaaatgtcaaaactatgttcttccaaatgacaaatttttatttttaaaatatttttactaactttacttgtatgttgaacagataatagtacaaaattcaaaaacaaaagacccaacttggtgaattttgttgatttttagtctttggattgaatctgatggtgtttagaagttgatggggtataagtagctctctaagctagatcctttattgcttcccatcagtctaaaatgtattagaagagaaaggcggccaggcgtggtggctcacgcctgtaatcccagcactttgggaggccgaggtgggcagatcacgaggtcaggagatcgagaccatcctggctaacatggtgaaaccccgtctccactaaaaatacaaaaaattagctgggcatggtggtgggcgcctgtagacccagctactcgggatgctgaggcaggagaatggcatgaatctgggaggctcagcttgcagtgagccgagattgtgccactgcactccagcctgggtgacagagcgagactctgtctcaaaaaaaaaaaaaaaaaaaaaaaaaaatagaaaggcctggttacaagaataaactaatggataatttttagctaatagcaagtttacctagaaatcagatatttaaatactgctgctgtatctatatttttatgtccatattttattgcccatgacgccactgattggtagatacacattttatgtacaactgagaaaaagaaacctagccagttaaactatttcccagcacctcctgttatttaaatgatctcttaggaaggaattgagtgtatctaatatatttttaaaatatatttattgaaagaactcttctggacttaacgatatataggcatttatcatttaacagtcttataaacatataaaaaatacaagaaaaatacatcaggtaagttttactcctgaaacttctgtacaagaaagtttaagtcttctgaatcactttcaactcaagacttcagtgtctctattttgccacgcaatttgccctttgtgctataaagaatattggtgaaatagttttaaaagaatttttttgtttattttgcattaacatcttctacaaagtttctgggaaaaataaatttataaaatgaaagttcagccaggcatggtgcccacacctgtaatcccagcactttggcaggccaaggtgggtagatcacttgaggccatgagtttgagactagtctgtccaacatgttgaaaccccgtctctactaaaaatataaaaattagcccagcaaggtggcacatgcctgtaatcccagctacttgcgaggctgaggcacaagaatcgcttgaacctgggaggcagagacagtgagctgagacagcgctgctgtactcctgcctgggtgacagagtgagactctgacaaaaaaaaaaaaaagcaagcaaggaaggagaaagagagagagaaagaaaaagaaaaacaaagaaggaaataaaagagtaagttagttcactaatgctgagttcttaagctgtttaccactgcaattttgtcatgttaacacaattctgactgttgctgggctggaaatgtagaggaacagatcccagcacttccaaccaccatttggtgcctagggttagtaactgctctggtatatctcagggttttcattacagttgctgagacccattctgctaattcaattcaatgctgaatttttaaatattcacacatgaaaattgctttgcgactgctgtccatctgactgcaattgaaagatgccattcattgtgaaattctacccaaatttagaattggaaatagacgaaaagaaatgtgcatctgcgccaggcgcggtggctcacgcctgtaatcccagcactttgggaggccgaggtgagtggatcacctgaggtcaggagtttgagaccagcctggccaacatggtgaaaccctgtctttactaaaaatacaaaaaaaattagctgggcatggtggcgtgtgcttataatcgcagctactcgggaggctgaggcgggagaatcgcttgaacccaggaggtggaggttgcagtgagcagagatcctgccattgcactccagcctgggtgacaagagtgagactgtctcaaaaaaaaaagaaatgtgcattttagagttaatgaaagataatgattaaatataatttctagaatttttagtgtttcagatgagaattgtggacgttcactgtgctcgtaagccaaaatgccaagtcaaaagcaaaagctcttcctgttggttcctaagtgtgatgattgggttttcacattcatgtgtgacatgtgcctccctcaaatcttgtgatgatgtcggcacgtgacccatctgacgtgggaaaaaaagtgaaaatgtaaaaagaaaaagcaaaagcttgaaattttgaaatgtcttaatttcttagcgtgattatccccttcgttagaatgctcgcaaatcttaacaatacatttttttcaggacatctaaagtgactcaatttgaacatttgaagtggcaggttaaaaaaattttttcccagggaggagccaagatggccgaataggaacagctctggtctacagctcccagcgtgagcgacgcagaagacgggtgatttctgcatttccatctgaggtaccgggttcatctcactagggagtgccagacagtgggcgcaggtcattgggtgcagtgcacgatgcacgagccgaagcagggcgaggcattgcctcactcgggaagtgcaaggggtcagggagttccctttcctagtcaaagaaaggggtgacagacggcacctggaaaatcgggtcattcccacccgaatactgcgcttttccaacaggcttaaaaaacggcgcaccaggagattatatcccgcacctggctcggagggtcctacacccacggagtctcgctgattgctagcacagcagtctgagatcaaactgcaagtcggcagcgaggctgggggaggggtgcccgccattgcccaggcttgcttaggtaaacaaagcagccgggaagctcgaactggttggagcccaccacagctccaggaggcctgcctgcctctgtaggctccacctctggggacagggcacagacaaacaaaaagacagcggtaacctctgcagacttaaatgtccctgcgtgacagctttcaagagagcagtggttctcccagcacgcagctggagatctgagaatgggcagactgcctcctcaagtgggtccctgacccctgaaccctgagcagcctaactgggaggcaccccccagtaggggcagactgacacttcacacggcagggtactcctctgagacaaaacttccagaggaacgattagacagcagcattcacggttcacgaaaaaccgctgttctgcaaacaccgctgctgatacccaggcaaacagggtctgaagtggacctctagcaaactccaacagacctgcaactgagggtcctgtctgttagaaggaaaactaacaaacagaaaggacatccacaccaaaaacccatctgtacatcaccatcatcaaagaccaaaagtagataaaaccacaaagatggggaaaaaacagagcagaaaaactggaaactctaaaaagcagagcacctctgtctcctccaaaggaacacagttcctcaccagcaatggaacaaagctggacggagaatgactttgacaagttcagagaagaaggcttcagacgatcaaactatgagctacaggaggaaattcaaaccaaaggcaaagaagttaaaaactttgaaaaaaatttagacgaatgtataactagaataaccaatacagagaagtacttaaaggagctgatggagctgaaagccaaggtttgagaactacgtgaagaatgcagaagcctcaggagccaatgcgatcaactggaagaaaggatatcagtgatggaagatgaaatgaatgaaatgaagcgagaagggaagtttagagaaaaaagaataaaaagaaatgaacaaagcctccaagaaatatgggactatgtgaaaagaccaaatctacgtctgattggtgtacctgaaagtgacggggagaatggaaccaagttggaaaacactctacaggatattatccaggagaacttccccaatctagcaaggcaggccaacattcagattcaggaaatacagagaacgccacaaagatactcctcgagaagagcaactccaagacacataattgtcagattcaccaaagttgaaatgaaggaaaaaatgttaagggcagccagagagaaacgtcgggttacccacaaagggaagcccatcagactaacagctgatctctcggcagaaactctacaagccagaagagagtgggagccaatattcaacattcttaaagaaaagaattttcaacccagaatttcatatccagccaaactaagcttcataagtgaaggagaaataaaatactttacagacaagcaaatgctgagagattttgtcaccaccaggcctgccctaaaagagctcctgaaggaagcactaaacatggaaaggaacaaccggtaccagccgctgcaaaatcatgccaaaatgtaaagaccattgagactaggaagaaactgcatcaactaacgagcaaaataaccagctaacatcataatgacaggatcaaattcacacataacactattaactttaaatgtaaatggacgaaatgcttcaattaaatgacacagattggcaaattggataaagagtcaagacccatcagtgtgctgtattcaggaaacccatctcacatgcagagacacacataggctcaaaataaagggatggaggaagatctaccaagcaaatggaaaacaaaaaaaggcaggggttggaatcctagtctctgataaaacagactttaaagcaacaaagatcaaaagagaaaaagaaggccattacataatgataaagggatcaattcaacaagaagagctaactatcctaaatatatatgcacccaatacaggagcacccagattcataaagcaactcctgagtgacctacaaagagacttagactcccacacattaataatgggagactttaacaccccactgtcaacattagacagatcgacgagatagaaagttaacaaggatatccaggaattgaactcagctctccaccaagcagacctaatagacatctacagaactctcctccccaaatcaatagaatatacatttttttcagcaccacaccacacctattccaaaattgaccacatagttggaagtaaagctctcctcatcaaatgtaaaagagcagaaattataagaaactatctctcagaccacagtgcaatcaaactagaactcaggattaagaaactcactcaaaaacgctcaactacatggaaactgaacaacctgctcctgaatgactactgggtacataacgaaatgaaggcaaaaataaagatgttctttgaaaccaaccagaacaaagacacaacataccagaatctctgggacacattcaaagcagtgtttagagggaaatttatagcactaaatgtccacaagagaaagcaggaaagatccaaaattgacaccctaacatcacaattaaaagaactagaaaagcaagagcaaacacattcaaaagctagcagaaggcaagaaataactaaaatcagagcagaactgaaggaaatagagacacaaaaaacgcttcaaaaattaatgaatccaggagctgcttttttgaaaggatcaacaaagttgattgaccgctagcaagactaataaagaaaaaaagagagaagaatcaaatagacgcaataaaaaatgataaaggggatatcaccaccaatcccacagaaatacaaactaccatcagagattactacaaacacctctatgcagataatctagaaaatctagaagaaatggataaattcctcgacacatacactctcccaagactaaaccaggaagaagttgaatctctgaatagaccaataacaggagctgaaattgtggcaataattaatagcttggccaaccaaaaagagtccaggaccagatggattcacagccgaattctcccagaggtacaaggaggaactggtaccattccttctgaaactattccaatcaatataaaaagagggaatcctccctaactcattttatgaggccagcatcatcctgataccaaagccgggcagagacagaaccaaaaaagagaattttaaaccaatatccttgatgaacattgatgcaaaaatcctcaataaaatactggtaaaccgaatccagcagcacatcaaaaagcttatccaccaagatcaagtgggcttcatccctgggatgtgaggctggttcaatatacgcaaatcaataaatgtaatccagcatataaacagaaccaaagacaaaaaccacatgattatctcaatagatgcagaaaaggcctttgacaaaattcaacagcccttcatgctaagaactctcaataaattaggtattgatgggacatatctcaaaataataagagctatttatgacaaacccacagccaatatcatactgaatgggcaaaaactggaagcattccctttgaaaactggcacaagacagggatgccctctctcaccactgctattcaacatagtgttggaagttctggccagggcaatcaggcaggagaaggaaataaaggttattcaattaggaaaagaggaagtcaaattgtccctgtttgcagatgacatgattgaatatctagaaaaccccattgtttcagcccaaaatctccttaagctgataagcaacttcagcagagtctcacgatacaaaatcaatgtgcaaaaatcacaagcattcttgtataccaataacagacgaacagagagccaaatcatgagtgaactcctattcacaattgcttcaaagagaataaaatacctaagaatccaccttacaagggatgtgaaggacctcttcaaggagaactacaaagcactgctcaatgaaataaaaggatacaaacaaatggaagaacattccatgctcatgggtaggaagaatcaatattgtgaaaatggccatactgcccaaggtaatttatagattcaatgccatccccatcaagctaccaatgactttcttcacagaattggaaaaaactactttaaagttcatatggaaccaaaaaagagcccgcattgccaagtcaatcctgagccaaaagaacaaagctggaggcatcacactacctgacttcaaactatactacaaggctacagtaaccaaaacagcatggtactggtaccaaaacagagatatagatcaatggaacagaacagagccctcagaaataatgccacatatctacaactatctgatctttgacaaacctgagaaaaacaagaaatagggaaaggattccctatttaacaaatggtgctgggaaaactggctagccatatgtagaaagctgaaactggatcccttccttacaccttgtacaaaaatcaattcaagatggattaaagatttaaatgttagacctaaaaccataaaaaccctagaagaaaacctaggcattactattcaggacataggcatgggcaaggacttcatgtctaaaacaccaaaagcaatggcaacaaaagccaaaattgacaaatgggatctaattaaactaaagagcttctgcacagcaaaagaaactaccatcagagtgaacaggcaacccacaaaatgggagaaaattttcacaacctacttatctgacaaagggctaatatccagaatctacaatgaactcaaacaaatttacaagaaataacaaacaaccccatgaaaaagtgggcaaaggatatgaacagacacttctcaaaagaagacatttatgcagccaaaagactgatgaaaaaatgctcatcatcactggccatcagagaaatgcaaatcaaaaccgcaatgggatattatctcacaccagttagaatggcaatcattaaaaagtcaggaaacaacaagtgctggagagtatgtggagaaataggaacactattacactgttggtgggactgtaaactagttcaaccaatgtggaagtcagtgtggcgattcttcagggatctagaactagaaataccatttaacccagccatcccattactgggtatatacccaaaggactataagtcatgctgctataaagacacatgcacacgtatgtttattgcggcactattcacaatagcaaagacttggaaccaacccaaatgtccaacaatgatagactggattaagaaaacgtggcacatatacaccatggaatactatgcagccataaaatgagttcatgtcctttgtagggacatggatgaaattggaaatcatcattctcagtaaactatcgcaagaacaaaaaaccaaacaccgcatattctcactcataggtgggaattgaacaatgagatcaatggacacaggaaggggaacatcacgctctggggactgttgtggggttgggggatgggggagggatagcattgggagatatacctaatgctagatgacgagttagtgggtgcagcacaccagcatggcacatgtatacatatgtaactaacctgcacattgtgcacatgtaccctaaaacttaaagtataataataaaaaaaaaaaaaaagaacactggcttataccctataatacctgatatttaataataaaaagaattacaggagagaaaagtctctacacacaaacacacacaaaaattttcccataataactcaaacatttgttttactgtaagaaattcagaggtctgatttaaggatgaccttctaattgaaaagaggaaaagcaatggaaagatatctgtatttgtaactgaaactggctcaaatcatagctgtattctcctttctttgaaatgtgtagaattatagccaatgggttaagaaaaattatttaaaacttgaaaataaggcaaccaagtagagcagcatatcctttcaatgtcatattggaacatttttaaaataaataaacctgaacaaggattatttattcaggagaacttctttaacttttgttttttactcttaattagagtctagacactgggaagttgtgtgttagtgtttagatttttggcagtagatgtctagtggaaaaaagaaccctatgtgttacacattttaggacattaaccagctttgcatgtaacctagcaattttatactaaaattttcaaaggctagaaacaccttctccatcagctctctttggatcagccttatttttttgccggtttcttcattattgagttgagtaaatcttgacatatatttattctgtatttttacaagtcctgttttcaactttaaaaaattttttcactttgtcaagattcaaacgtctcaagtgaaatagttactacttgtcattatggtatatatttgtaggttgacaagtgctcctggtggtagttcatagtgatctgcagagatgaaaatgcatgtttacgacgtttaaaagtagattgctgagcctgtgcatgacttagacttcatcaagtgactcggatgtgattagcaaatgattctacttgtgtggatggaagagtttcaggggccagagctggccttgtgcaaggaatctagccagaacatttcagaagagcctagggatgcagtggtgccccacgaggcagctgttcatctttgcccctccagcacctggtgtggggttttttaagctctcaaccatgtgtgtggtagtttcctggagttaccatccttgtccttcaggggatttgaggatttgagcctctttttgcagaggctccagaaacgcaaggttgggtcttcagaatgatctctaggaaggaattgagtgtatcagacattaaatttacttagttccagtttacccccaccgtgcactttttcttatctctctccctcttccattaatcccatttttctccctcctttccttccctcctcccctttttttttgtgttgacctatttacaaactcacctcacttgagatgatgtggaagattacatcacgcttaacatatatatatatatatatatatatatatatttgattacctgaaggctttctataatgccttagtggaagcctttatggtaaatgccaatcaatgaaacacagggagtagaagtttcctgtgtatttgaatgttgcattgatcaccttatctagtgtacctagccattttcttaaggtagtaattaaagtgtttcatacttgaagtggtttagggtcatgagttttgaattgacagaatactcaaagtacagtgctgtattttcttatgtagctcatgtaggtcagcactcaaaagtcaggtaagatgttgctgaaagtataaatgagtggaaaacaagaaaggctgttaaattctttgccagagaaatcttcataaatagaacaagtgaccatccgggtgggagactgaaaatgtctgttcctgaattcactgagatagagaggtagaatatccccacaatattttgggggacttttgcttctttaattcattgtctgattatgttgataaaaccccggggatggagatatgtacagttcaacagtctcaggaaggaggccccttaagtacaatgtttaggggattcaagataagtgtgggctcagaatggtgtcaggaatcagaaccctggagccagtgagaaagccagacttcacatgaatgacatctgaagtctagtaagagctcaaggtcagttgatgtcttgaggggagccaggcatggtgtaagaaccaggatttcttcaagagggaactttagaagaatgtagtggagaatgctgacgccactccagactgaaagctcatagtcgacagctgcctcctcacaagagcccacctggttctgggtcctgttcacagcattttctgggcatcatgtcatttaaccctcacagcaggccagtgagagagtaatactattactttccagtgttgtaggggaagaagtggccttagagaggtgaactttccttctaagagtatcaactgatattgaagcttgcattggaacccaggttggtctctctccacctctgtgctgccagtcgtgaccctgtgctgccccctatgtctgctcctcccacctgttgcaagtagccagcctcttacctgatgaagaccatcaggcctgaaggtccaggctctttggctcctgcagaaagcccaattggggtgggacatctggtcatgcagaagccacgtgactggtgggcacaggactcccaggcacctgttctctcaagggtgggctcttctggggacatttgggggctacttatgattcttttgagctgtcctttgacttattccttccaacctccaacataaagggccactcagagaagcagtacctatggcagctttaaaccgccctgctcctctgctgttctgtctgacagcatgagaagccagcaaaagcttcttcacatcagggtgccagtggggaaacaggaaggaaaagggggaataagaaggaaaagcatgctattttctacacaggggaggatttcataccaatgtgttcagaatggttttacaaagactgtgcatatatgctccaggtctgttcaggaaagattcatttgtggaggattgaaatgttcctattaatatttcttagagaaacagaggcatctactgaatttcacaaaatgtaatatgaaaactgatctccaagggtcagctttaatattttacttccttcttcattgttgaaaatatatttcagctctcttttacataccagcatacagcacagggagaagatagcataatcactgtgaaagtattatcaaatgcaagcacgcatttgcatttttggcaaacaaccacttttgattttacattgtattgttccataatatttaaagcacaaagtcctgaaattatcaaacctacttgagtttgcgatagtcagatactagtttcattgtgcttttaattaataaaatgtggattgtctaaattaaaattttcattatgaaatattttggccataagggaaaaaacagaattaaatggtattcatgtatgtgcctaccactcagattttacagatactaactttgtgctgtattttcttcaaacgtgactttatgttgtgactattaataaaatagcacattacaggtgtagttgttgtacagccccgttcacgtcctctcttcctccctttctcctttcatgaggctgatgtatattagtcccctgaattattattattattattattttttgagacagagtctcgctgtgtcaccctggccggagtgcagtgccatgatcttggctcacagcaacctctgcctcctggttcaagtgattctcttgcctcagcctccccagtagctgggactataggtgcacaccaccacgcctggctaatttttgtattttagtagagacggagttttgccatgttggccaggctggtcttgaactcctgacctcaggtgatccacccacctcggcctcccaaagtgctggaattacaggcatgagccaccgtgcccagccccctgaaagtttttatgctttgacaacatggttgtgaaaatactaagtgaaattttctttagagctgtattttgaagtaacattatcaatttagagccataagcctattcttttattattatactttaagttgtagggtacatgtgcacaatgtgcaggtttgctacataggtatacatgtaccatgtttgtttgctgcacccatcaacttgtcatttacattaggtatttctcctaatgctatcctccgccagcccccctacccacgacagccccagtgtgtgatgttcccctccctgtgtgcatgtgttctcattgttcaactcccacttatgcgtgggaacatgtggtgttaggttttctgtccttgtgataattttgctgagaatgatggtttccagcttcatccatgtccctgcaaagcacatgaactcatccttttttatggctgcataatattccttggtgtatacgtgccacattttcattatccagtctattattgatggatatttgggttggttccaagtcttgctattgcgaatagtgccacaataaacatacatgtgcatgggtctttatagcagcatgatttataatcctttgggtatatacccagtaatgggatggctgggtcaaatggtatttctagttctagattcttgaggaatcgccacactgtcttccacaatggttgaaccagtttacagtctcaccaacagtgtaaaagtgttcctatttctccacatcctctccagcacctgttgtttcctgactttttaatgatcgccattctaactggtgtgagatggtatctcattgtggttttgatttgcatttctctgatggtcagtgatgatgagcatattttcatatggctgttggctgcataaatgtcttcttttgagaagtgtccatttatatcctttgcccattttttgatggggttgtttttttcttataaatttgtttaagtactttgtcaattctggatattagtcctttgtcagatggatagattgcaaaatttttctcccattctgtagattgcctgttcactctgatgatagttactttggctgtgcagaagctctttagtttaattagatcccatttgtctatttcggcttttgttgccattgcttttggtgtttttagtcatgaagtctttgccaatgcctatgtcctgaatggtattgcctaagttttcttgtagggtttgtatggtgttaggtcttacatttaagtctttaatccatcttgagttaatttttgtataaggtgtaaggaagggaatccagtttcagctttctacatatggctagccagttttcccagcaccatttattaaatagggaatcctttccctatttcttgtttttgtcaggtttgtcaaagatcagatggttgtagatgtgtggtgttatttctgagggctctgttctgttccattggtctatatctctgttttggtaccagtaccatgctgttttggttactgtagccttatagtatagtttgaagtctggtagtgtgatgcctccagctttgttcttttggcttaggattgacttggccatgcaggctcttttttggttccatatgaactttaaagtagttttttccaattctgtgaagaaagtcattggtagcttaatggggatggcattgaatctataaattaccttgggcagtatggccattttcacgatattgattcttcctatccatgagcatggaatgttcttccatttctgtcctcttttattttgttgagcagtagtttgtagttctccttgaagagttccttcacatcccttgtaagttggattcctaggtattttattctccttatagtaatttgaatgggagttcactcatgatttggctctctattcttggtacataggaatgcttgtgatttttgcacattgattttgtatcctgagactttgctgaagttgcttatcagcttaaggagatttttgggctgatacgatggggttttctagatatacaatcatgtcatctgcaagcagagacaatttgacttcctcttttcctaattgaatagcctttatttctttctcctgcctgattgccctggccagaacttccaacactatgttgaataggaatggtgagagagggcatccttttcttgtgccagttttcaaagggaatgcttccagtttttccccattcagtatgatattggctgtggatttgtcataaatggctcttattattttgagatacattccatcaatacctattttattgagagtttttagcatgaaaggctgttgaattttgtcaaaggccttttctgcatctattgagataatcgtggtttttgtcattggttctgtttatgtgatggattatgtttattgatttgcatatgttgaaccagccttgcatcccagggatgaagaagacttgctcgtggtggataagctttttgatgtgctgctcgatttggtttgccagtattttaatgaggattttcacattgatgtttatcagggatattggcctaaaattctctttttttgttttgtctccaccaggctttggtgtcaggatgatgctggcctcataaaatgagttagggaggattccctgtttttctattgattggaataatttcagaaaaaatggtaccagctcctctttgtacctgtggtagaattcggctgtaaatctttctggtcctggactttttttggttggtaggctattactgcctaaatttcagaacctgttattgttctattcagagattcaactacttcctggtttagtcttgggagggtgtatgtgtccacgaatttatccatttcttctagattttctagtttatttgtgtagaggtgtttataatattctctgatggtagtttgtatttctgtgagattggtggtgatatccctttatcattttttattgcatctacttgatttttcactcttttcttctttattagtcttgctagtggtccatctattttgttgatcttttcaaaaaaccagctcctggattcattgatttttttgaagggtttttttgtatctctgtctccttcagttctgctctgaccttagttatttgttgtcttctgctagcttttgaagtttttacttttctctagttcttttaattgtgttgttacggtgtcaattttggatctttcctgctttctcttgtgggcatttagtgctataaatttccttctacacactgctttaaatgtgtcccagagattctggtacgttgtgtctttgttctcactggtttcaaagaacatctttatttctactttcattttgttatgtacctagtagtcattcaggagcaggttgttcagtttccacgtagttgtgcagttttgagtgaggttcttaatcctgagttctaatttgatggcactgtggtgtgagagacagtctgttgtaatttctgttcttttacatttgctggggagtgttttacttccaattatgtggtcaattgtggaataagtgcgatgtcgtgctgagaagaatgtatattcttttaatttggggcggagagttctgtaaatgtctattaggtctgcttggtccatagctgagttcaattcctggatatccgtgttaattttctgtctcgttgatctgtctaatattgacagtgaggtgttaaagtctcccattattatttagtgggagtctgagtctctttgtaggtctctaagaacttgctttatgaatctggatgctcctgtattgggtgcatatatatttaggatagttagctcttcctgttgaattgatccctttaccattatgtaatggcattctttgtctcttttgatctttgttggtttaaagtctgttttatcagagaccaggattgcaacacctgctttttttttttttttttttttgctttccgtttgcttcttcctccatccctttattttgagcctatatgtgtctttgtctttgcacatgagatgggtctcctgaatacagcataccaataggtcttgactctttatccagtttgccagtctgtgtcttttaattagggcgtttagcccacttacatttaagtaattggtgttacttatgtgtgaatttgatactgtcattatgatgctagctggttatttcgcccattaattgatgcagtttcttcctagcatcagtggtctttacaatttggcatgttttagcagtggctcatatcagttgttcctatccatgtttagtgcttcctttaggagctcttgtaaggcaggcctggtggtgacaaaatctctcagcatttgcttgtctgtaaaggattttatttctccttcacttatgaagcttagtttgtctggatatgaaattctgggttgaaaattctttaagaatgttgaatattggcccctactctcttctggcttgtagggtttctgcagaaagatccgctgttagtctgatgggcttccctttgtgggtaacttgacctttctctctggctgcccttaacattttttccttcctttcaaccttggtaaatctgacaattatgtgtcttggggttgctcttctcaaggagtatctttgtggtattctgtgtatttcctgaatttgaatgttggcctgccttgctagattggggaagccctcctgggtaatatcctgcagagtgttttccaacttggttccattctccccgtcatttgcaggtgcactagtcaaatgtagatttggtctttcacatagtcccgtatttcttagaggctttgttagtttcttttcactcttttctctgatcttgtcttctcgctctttttcattaatttgatcttcaatcactgatatcctttcttgcgcttgatcaaatcggctattgaagcttgtgtatgcttcacgcagttctcgtactgtggttttcagctccatcaggtcatttaagctcttctctacactggttgttctagttagctattcatctaaccttttttcagggtttttagcttccttgtggtggattagaacatgctcctttagctcggagaagtttgttattaccgaccttctgaagcctacttctgtcagctcgtcaagctcattctccatgcagttttgttcccttgctggagaggagctgcgatcctttggaggagaagaggtgctctggtttttggaattttcagcctttctgttctggtttctccccatctttgtggttttatctaactttggtctttgacgttggtgacctacagatgaggttttggtgtggatgtccttttttgttgatgttgatgctattcctttctgtttgttagttttccttctaacagacaggcccctcagcttcaggtctgttgcggtttgctggaggtccactccagaccctttttgcctgggtaacacccctggaggctgtagaacagcaaatattgctgcctgatccttcctctggaagctttgtcccagaggggcacccacctgtatgaggtgtctgtctgctcctactgggaggtgtcttctagtcaggctactcgggggtcagggacctgcttgaggaggcagtctgttcattatcggatcttgaaccctgtgctgggagaaccactgctctcttcagagctgtctggtagagatgtttaagtctgcagaagatgtctgctgccttttgttcagatacgccctgcctccagaggtggaatctagagaggcagtaggccttgctgagctgtggtgggctctgcccagtttgagcttccctgctgctttgtttacactgtgaacatagaaccgcctactcaagcctcagcagtggcagacacccctccccctgccaggctccagcatcccaggttgatcttagattgctgtgctagcatcccaaggatctgtgggcgtgggaccagccaagccaggcacaggagggaatctcctggtctgccgattgtgaagactgtgggaaaagcacggtattttggcaggagtgtaccgttcctccaggtagagtcactcatagcttcccttggctaggaaagggaaatccctggaccccttgtgcttcccgggtgaggtgatgccccaccctgctttggctcgccctccataggctgcatccactattcaaccagtcccagtgagatgaaccaggtacctcagttggaaatgtagaaatcacccgtctgctgcgtcaatatcactgggagctgtagaccggagctgtttctatttggccatcttggaagtgacccgtaagtctattcttaaagtcatttttctgtgagatataattcccgaagtgcctacttgttggaggaggttgaggttagtataattactatcaaaaaatacactttcagaaattggttccagcttttcctgcccctcactccttctctgagcagcttgatggatccttccccacgtgtgtcccttataggtgtccgctccggcagataccccttggagacatatgcagagataactaccatttgtttggattttgctccaacacaaccagcttatacacattatacaaaaacttgcttttttcatttctcagttcatcatgaacatgctcacatctaagtagattgataatctggtgctttctaatatatttacatagaagtttatatcgcaaattctgttcctttcattttcttcttttttaaaccagagccttttctccttaacttcactaaatgaagctacccctctctttttcagcctcccttctttccggtgctgagtgttagccatctgagtgtatgcttcccaccatttctaaatgcttttacgatcgtgtgtatacatgtgcacatgcacgtacacactcatccacacacatgcacacataggtatatttgatcattgctgtacaaaaacgggatcacacttgctacattctataaactaagtggctgttactgttgaggtttgaaaaacataaaaaaaaaaaaaaaagccccaacattgctcaaggtgccagaacatacctgggagatccagacctctcacccaggttttctcaggcagtcactttctctgcacccagcttcaaatgaagaccagtcccacacagccctggcagctcagggcagcgttcgtgggccaggccttcccaacctctgctttgggtttgcaggagaacagccacctcctatcatccagatttcaggcaccgcttcctctgatatccaaggtcatgttagactgtacctggaaccatgactgcatgaggttcacaaggacaccaaagctttattttttattttttaacatagtagtttttgactccatctaatctgtttgctaaggttaggggcaatgtggcattcacatgctatttacctaacatttccaatactttcatccttcatcaaggttattacttttctggttggcaatggactcaaatcctcattcccaaaagcttgttctcagggctgggaaaggcacagttgctctgttggcaggtgggcagatttccatgggctaaaacaaaactgaagcagaagtcaccgtatttctgttgctcctgacccttgacagagaaagagagtggaaaatttctcctcggtatttgttagctttatcgtggggtgtcacacgatgcatttgaaaaaagttaatttgaaattttaatttcaacactgatttttaaaccagaactatgtccatctctcttgtctttttatcctcagctctggctgattcccgctggaattatttccaatatgttctccagaaaaccatctcctgtcagaaactttcaggatcacaggggccgaatgcgtctgtttagctattaggttgaatcatatgataacattacatttttgtacgtcaaaaatggccagatagtgtcacttaagtggttcaacccaatatgtttaccctgaatatttacaggtcggaaggcttgggagctagaaggccccattaggattttgttacccagttctcaatatttacaggggaccaccgggagccggcctaattgcccagttggtgatgaattgattcacctgtgctgaagccgtcctcatacagtccccctgacgaactgtgaagtgtagtgtgaacggtcaggctccaggaggtgtaggcttcaaggattacaataaaggatgggggttttttaaagcccagagggctattccctggcaggaaaggaaagttgggcaaacaccctggaggggcccaaacccaagagacctcaggacctgagattgcccctgactctgaggattcaaatcagacagatcctcttcctggcctcttctatccacaccctagtctccccacactgtttgaaatgatgtgggcagaatgcaggccactcacactgactgcagagggctgacttgggcaggtgggcatgagcctttctgcccagcgtgagtccctctggcacagctggatgctgacctgcagggaggcgcttcagcgagtacttgagcagggtcgaggatgagaagccaaactgtttctcatgttctcctgcaaaatgaatttatttccttgttagagaacagtgggcatacccctagtcaaatataagtgaaaatcgatgcatctttatttacaaaaagttagaaagatatggacagatagaaaaaaattacctgtcttcccaccactacaaatcattattactactactttggcaaatttccttccagattttaatgcattcaaaaaatacataattatgctaagtctttgtcttgatactgctaatccatgtatactttatataataatacatagaaaatattctatataaaacatatattgacaaggactatatactactatagagattgtatacaaaatacaactagcatgcattttatatttctacccttttcattcatcataagtaaatactctatgcacataaatgttgcatagtgttccctacagtcgattttccatcatgtagttaacaatttttttttttttagtgtagtagttaagtacgtggactctggacggttgggttcaaatgtcaacacactgattgtgtgaatgtgggcaagatgtttaatctctgtttgtctcagtctgttaatctttaaaataggtctaagagttatatgtagcctgttaaagaaaaaaaaaaaaagaattccgcatagcctgttgtaaaaaagagaccaaagtcttcagatgttgccatttataagaagtatattgaagggaggtaagctatgtttaccagccatggctcagatccctagcatgtcaaaattagatgttgtcttttatgtctgaatatatcaaaggccccatctgaggtttgcctttaaaaaaaagaggagaagaaattttgtgcctaagacacaaaatttgggcattgagtcactgtgatactagctggcaggggaatggggaccttctagccatgagctaaggttactgaaaacattcctttcaacataacatttgcaggacagataatttgttgagtgagacatttgggagtctataaaatcattacagtatccaggggaacaaaacattaaacatttacaaaggggccactgtgttgttcagggagcaaaatattagcatttctttgttaattaagattttgaacttttgattaaggagtttttaactttgtacaaggactgattttctgattaattcatgggtcgctgggaggatcaaacacttagaacaagagtctgcaaatgtttcccataaagggccaggtagtaaatatttttaagttttgtgagccatatgcaaggctgtgtcacagcttctggattctgctccctgatgtgaaagcagccacagacagtatgcaaatcaataagtatgactgagttccaatatgacttttgttatggatgctgaaatttgaatttcatgtcattttcacatcacagatttttttcttttgattaaaaaactatttaaaaatgtaaaagaaaaaacattttagactctcaactgtacaaaaagcatttggctcctgggctgtagttggctaacccctggcttagagcagtacttggcactagtgactgctatgtatgtgttggctcctacccccacaattgcagctgttgttatcaccatcgtcaccatctacatccttctgctattataaataaagcactgaagaacatcttcagggagaaaggtttttgtccctcccctgcttttgcagttactaactgtgctgcagccctatgctagggccagatggtgctaggttctggagaaatctctgcatgcctttgacttcctgggagtccatgtgtaacagctgcagcttgatcagctcctcacttcaccatggcagagaggtttcccctcccatgctgatggtcgttcctcaccagaggctgcctggaaagctgtgctgggctccaggagaatgggcttcatgatggattatcaagacccaccttggagtgatgtttgcacatgtgctgtgttctttgttggacatcatagcctgtgctctccctggggatgaatgaaaaagggagacagagatgcctactgtacatgacatgtatttatcccttgttttaaagtgacgagaggtgggagaaagggggtcataaaaggagtggtacaaggaggagctgggaagtaagggaagaaagaataggacattgttgctagaatgagccatgatatctggattgttccaaatcccccatgcactcagctgagtagaaaaattgcaaatatctttataaaccttgacaatactatttcattattcataaagacttttttaaaaatcataaccagcttcaattttaaaggaaatttattcccaaagcattttttaattgagtttttatggtaattctttgtattgactgttgaatcaacataccaaataaaatatgttccagtgttttcttttattcaggaagtcttaattctgcttcttcaaaataatgaagtggcgagagtcaattcagattttcatgaattacatacctggcagtacacggccttttctaagagtaaatttaaaagagtattattttttaactaggaaagtttgccttaaattcagaatcgttggtgtatgatctttcattgtgttttcctgtgtaatttatgagtgtgtgtgtgtctttctgtattgttaagacttttaataactcacttctgaaatagaagttacttgaaggcaggtactatttttgttttaaacacatctttggatgaaatgtatcatttctgtcttgcacagtgccttgcgtagtagtggacgtccaaaattgtgtgatgagaagaaggaactctaggggttgcaaggcatctagtggttatttgcctttcccttccctagacagtgtctctgctgtatacagccagccctgactacagtattgctcaggacaaaatcttctctgctattcctgtttctgtagtggcacagaatactgtcaataccctttcagatgcctgaagacgttgttagtccaactaacaacggaagttagtacaacttccatctcagttaatcactgcacctcacacacctttctttttatttcctgggctaaataactggcttttttttttttttccaacttttctgacatgcctctctcctctgatatatctgcttctttctggccactcttgtgtgcacgatttcttgtgtatcaggaactgggttgcattgtggcctgcagactgtgcatcgtgtccacatgtgacctgggcagggcccagtccagtggaacctcttctgttcttgttgtgctaatattaataaaacccaacatggcatagccttctggctgccacatgaagttgactcctcttggacttgttggcagctccaactcttagttgataaattgaacggtcatggactctgcttggtttcagaacattttcagggaggatattcccttagtgacacttggaggtggtcttagagcttcattgaacctggggtatcacaccaggggtaaagttgtggagttgtccagcccagagaaacagagccaaggctgggaccaggaggtagcaggtgggtgaatggaatgagagagatgagcggaagtgttaaggaggccaggcaaagagaagaggatgtccatcagagagggaggtacactggggaatccagggggcttagaatctattggcctagatccctagcatcttcctgggtgtttctttcatgaggcacctttgtgcctcaccttaaagaatcaaattttaatgatgaggagctgggatatcatgaattattcatgagccagatttcccttaatctctagacatgtgcttgaatttctaaaactcttttttatgggacttcacatttctctgattaaatttcttcttgctaatggaccccatattcctagtcaccaaagaccttttgaacctaaaggggaaaaaagctgcagaattgaagtggtgactctgccacttactagccattgtcttgcccaagttgcaagttctgacctcatccataggatgagaaccataacaggtacctcgtcacttgttttgttgggtggttgggaagataattggaattttgcatttggagtgcctggtgtgaagcccatcagtatcagtgccaacaccttgtcacagttatttttctgctctcaggatattcaccatgtctctctcttaggtcaggtttgatagactgtcttctctgttttcatccaatctattgattcttattaataaattcctgttacatatggagagggaccaacagcagaatctgaagattcctagaggctacttgtaaggatctttgggacactggtccatgttgggggttacaaagtcagaggccttcaacagcctcattattcaaatgtgtaagcaaccaggtgaggagagagtggtggggcccatgtcaactcaaagaatgtatgtcctatctaaagcagtcatttcactaagagtcactgcccaatccaacacctagtacagggggagtcaagggcaccagctccatgggctgctgtgaatagctccctaacatgcgcttgcatttggttaatgtggctttggagcagtggttcttatagtatggtccagaagccatcggcagcacctaagaacttgtatgaatgcacattcttggctccattccagacctactgaatctgaagctcttgaggtggggcccagcaacctggggtttaacaggccctctaggagattctgatattcttgagaatgatttggaaagtggttctcaaccttggaaggacactggaatcaatgttctggggagctttaaaaatccaaccgcctggctcccaaccacagagcttctcattgaactgatttgggctagaacctggacaccaggattttttttaaagctccccaggggattttcaggtgcatctaagacagagaactgctgttctcaggagcttattgaaacacccacatattcatttctcctgggtgaagaggtgaggagagggaggcatgtatcatttgacagagttcctagatgacctcttttccccttacagaacatgaccttgaaccaccagcctcaagaaatagccttgaatagggcttttcatagattaagtgaatattcactcaatgtgatttgttttaaaggttgcttttaatgctgtatttgttcagcaaatgtagacgctattataacacaaatattaactcctgaatcctcaaaggctttccccacgctatgccatctggcaagcattgttatcatcatctctttattatccacgctaataaaggactagcatggcactggtaattgaaaaacacgtatcatttaaaaatcattcaggctagtgccagtactgttttcccaaccaggaagcattcaagagtagaaatattgcctgattacagtttgctacttccctgcggaggtgctaatacatattattttagtgagaaatttgagtcattggagtgagaagcttctaaattataattcctgtttctgaataaaggggtttgttttattgacaagagtcctgagcacagagacaaggaacagcaagtatatttaaaatgcatgtgcacctgggaaccagtggattaaagcgtgatataatatagaagctgcatggggatttgaggaatggtagatctggattctagatctcctgacattacctgtgtcatttgagatgagctatcctctctaccagtgggtctcaaagagtcctcaactagcaacatctgtatcacctggggatttattagagatgcagattctttggcctcaccccaggcctactggatgagacttggggtggggccagcaatcagtgctttaacaagtcctccaagaaattcagatgcctgctcaagtttgagcactgctactctccaccaggggctcagtttttttgtctataaaataagaagaccagcctagattatatttaaggtttactctagctctccagtggccatggtgtatgggcacagaataagtttagagattttctgtcttagagcttatattttcccttggatgtgtgattgaaatcattccgctgaaaaactgacaggcaggtaacagaaaagaaactgatttccaggaactagatactcagactagatacccaaacagcgccttgggtgctcactacaaaataactcataatattttcagctggttggtactactttcccaaagtgaaaaaactctggtgttttggaaagggaagtagccatctcccctttctctaggggctgagagctgtctgctgtgattcacagagcagcatttcaacagaaactaacaaatggcatttcagaaggatgtacagaggtacacaggctttgcagtaaaacaagggaaaatttcaagccatttatcaaagcccctgcagcttccatttcaagacaggtggaaaaaaataacatggaacaagaaaagaaaataaatctgtatccaaagcatctcataaataagaaaggagtgggggagttgctgggcttgctgggctctcagagtatttttgtcacagtacagaaagcttttaaatgttttggcgtgaaattcttttccttttcttgttattaaaatttgtggttgtaaaattatttcactggctattaaaaccaaaaaaggaaagctgagaaaatgatacgtggagtgagagagagagagagagaatgagaacatagttcattctgtaccccaaaatattttttatttttatctgaaatgtagtgatgctccataatttaggcacgtcattgaaaatcaaaggcaattttctaattggcttttgttcagtaagagcctatttgctgcagaaaattaggatgtggtttattgaacatgagagagacatgggtctgttataatgtctgagggggtggagaaattataacttttactaaaaagataggccagtcgcggtggctcacacttgtaatcccagcactttgggaggccaaggcgggtggattacctgaggtcaggagtttgagaccagcctggccaacatgaggaaaccctgtctctactaaaaatacaaaacttagccaggcatggtgacgcatgcctgtaatcccagctacttgggaggctgagacaggagaattgctagaacccagggggcagaggctgcagtgagccgagatcatgccactgcactccagcctgggtgacagaatgagactccatctcaaaaaaaaaaaaaaaaatcgaccggctgcagtggctcacacctgctgtaatcctagcacattaggaggccaaggctggcaaatcacttgaggtcaggagttcgaaatcagcctggccagcatggtgaaacctcatctctaccaaaaatacaaaaattagacaggcatggtggcaggcatctgtagtcccagctactcaggaggctgaggcaagagaatcgcttgaacctgggaggcggaggttgcagtgagccgagattgcaccactgcactccagcctgggtgacagagcgagactcggtcgcaaaaaaataaataaataaaaagatggatctcaggcccactctgccagagggaataacgttgattgaggagaacctgcattgaacatctttgtgaaattcccagcaatgttgggttgttgatcaacctggttaaaagcccatgctctgagttcacagtctggctttgccacataactggctctgaaactttgggcaagctacccaattgtcagtgctttagtttcctttgggggataatgacagcatctacccggtgggagttttgtgaggattaagagctccatatgcaagacactttgcgcaatgcctggtgcatagcaggcattcttttattgagactatttgctaattagtcacgtagttctttaaaggaaccctaaaactcaattactttgttttttaactgtaaggattttttgaaaatagcaaatgaatgcctgtggaggggtgtgattgataaaaggaggcttgaaggacatattgggtgcaaaattcaaagaagattgataactcttgagccatgggatcttctcctccatcagcttcactaacatatagctttggggaattgttagaattaggttcagagatactaattttttcccactagatttcctttcttacgtatttatttttgaaactcatatagcaacactagaaataggtctgaactaagtatcatgtgtttctcttttacatttggctcccctcctgtgtcagctggcctatgatgcacagtggctaatattgattagcctacatttttcttaaatacagttttctcagtctatgtaaagtctaaatgctagcagtaccaaaataaacgcattcaacttctaaactggtggtaaggaaaaaagtaggaacaaaacatagttgagacatattgtccaatgaaatcattgcctgtgatgccacagccaggtgtgaggtctggggcaagcttccaaactcatctgagcggcagtttcctcatcagtagaaccgggataagaatagcacctaccaggtgtgagatttaatacatgtaaagtacaaaatagtgctaacacccagaatgtacttagcaaatgttaacttcttaaatgttacttgtgttcatgagaatccaatgtatcaaagtgaaaataatcaatttgtgtgtaatggggaggaagttttactattctttactaaataactaaaaacattacaaaatatttaatggcaagttactttttagacttaatctctggtcatttatttccaattaagactggaccccactgtatttgacatgcggaatggtttttatttttgttacgatcatatttattttgagatgtatccttcttatcattagtagcagttctctagtattttaaaaactttccaacattggaataaatgaatcaggataaaatgctaaaataaaatactcaaatcattgcacttattcaacctctagttgtggacagcgatgctctttaaactgtggactgtggccagtaggcagcactactctctcatagtttcagatattgcctattagcttataaacaaaatttcagatcagcatgggtaagacagtttagatgtattcttgaataatgtagaaaagtgtgggttgtttgatcctcaaacaagtgaacagaaaggccttccagcaccaaagttagaaaaaaaattgcctttaaccaaaattgccctggagaaacagagattcatgctgtttatccagggacaaaatgaaagtatgttatttcatacaaattatctggatcatgaggcaaaagcagttttctttcatacctctttaacttttctttttcatctgtttaacctgtgggaaaaacaacttgtcttaaattattcaccatttagatctgaatttttaaattttcttattttcagttttttttggtttatttcagtagggttttggagaacaggtgatgtttggttacatgaataagttctttagtgatgatttctaagattttggtgcacctgtcacccgagcagtgtacactgtacccaatgtgtagtcttttatccctcaccaacccccattctttcccctaagtccccaaagtccagtgcgtcattcttatgccttagctcccacatgagtgagaacatacgatgtttggttttccattcctgagttacttcacttagattaacagtctccaattccctccaggttgctgtgaatgccactatttcattctcttttatggctgagtcatattccatggtgtatataaatatgccacgttttctttatccactcattgattgatgggcatttgggctggttccatatttttgcagttgcaaattgtactgctgtatacatgtgtttgcaagtatctttttcatataatgacttcttttcctctgggtaaatacctagtagtgggattgctggatcaaatggtagatctacttttagttctttaaggaacctccacactgttttctatagtggttgtactagtttaccttccaccaacagtgtaaaagtgttcccttttcactgcgtctatgccagcatctattgttttttgatttcttgattatagccattcttataggagtcaggtggtattgcattgtggtttcgatttgcatttccctgattattactgatgttgagcattttttccgtatgcttgttgtccatttgtgtatcttttgttgagaattgtctattcatgttcttagcccactttttggtgggattgtttttttcttactgatttgtttgagttctttgtaaattctggatattagtcttttggtcagatgtatagattgtgaatattttctcccattctgtgtgttgtctgttaactctgctgattatttccttttctgtgcagaagctttttagttaaattaagtcccttctatttatgtttgtttttgttgcatttgcttttgggttcttggtcattaagtctttgcctaagccaatggctagaggggttttccagtgtcatcttctgtaatctttatggtttcaggtcttagatgtaagtcttttttttttttgagacggagtctcactctgtcgcccaggctggagtgcactggcgccatctcggctcactacaagctctgcctcccaggttcacgccattctcctgcctcagcctccggagtagttgggactataggcgcctgccaccacgcccagctaattttttgtattttttttttttttttagtagaggtggggtttcatcatgttagccaggatggtctcgctctcctgacctcgtgatctgcccaccatggcctcccaaagtgctgggattacaggcgtgaaccaccatgcccggccttagatttaagtatttgatccatcttgagttgattttcgtgtaagttgagagatgaggatccagtttcattcttctacatgtggcttgccaattatcccaacaccatttgttgaatagggtgtccttttcccactttatttttttattttctttgtcaaagatcagttggctgtaagtatttggctctatttctgggttctctattctattctattggtctatgtgcctatttttaaaccagttccatgctgttttgatgactgtcgccttatagtatagttggatgttgagtaatgtgatacctccagatttgttctttttgtttagtcttgcattggctctgtgggctcttttttggttccatatgaattttaggattattttttctagttttctgaagagcagtggtggtatttggataggaattgcattgaatttgtaaactgcttttgacagtatggtcgttttcacaatattgattctacccatccatgagcatgggatgtgtttccatttgtttgtgttgtctatgatgtctttcagcagtgttttgtagttttccttgtagaggtctttcacctccctggttaggtatatttttaagtattttatttttttgcagctattgtgaaagaggttgagtgatttgattttcagcttgatcactgttggtatatagcagagctactgattggcatacattaattttgtatcctaaaactttactgaatttatttgccagttttaggagcttattggataagtctttagggttttctaggtatacaatcatatcatcagcaaacagtgacaatttgacttcctctttattgatttggataccctttatttatttctcttgtctgattgctctggctaggacttccagtactatgttgaatagtggtgaaagtgggcatccttgtctgttctagttctcagggggaatgcttccaccttttgcctattcagtagaatgttgatggtgagtttgttgtaaatggcttttattaccttaaggtatatcccttctatgcagattttgctgagggttttaatcataaagcgatgttggattctgtcaaatgcattttctgcatctgttgagatgatcatatgattttcgtttttgattctgtttatgtggtgtatcacatttattgacttatatgtgttaaaccatcccagcatccctggtatgaaacccacttgatcatggtggattatctttttgatacgctgttggatttggttcactagtattttattgaggatttttgcatctgtgttcatcagtgatactggtctgtagttttctttttttatgatgtccttccctggtttttggtattaagatgatactggcttcatagaacgattaagggaggattccctctctctctatcttttggaatagtgtcaatagattggtactaattcttacttgaatgtctgatagaattcagctgtgaatccatctggtcctggactttttttggttggaaattttctttattaccatttcaatctcactgcctgttattggtctgctcagagattctatatcttcctggtttaatctagaaaagttgcatatttccaggaatttatccatctcttctaggctttctagtttatatgcataaaggtgttcatagaagccttgaataatcttttatatttctctagtatcagttgtaatatctcccattttgtttccaattgagcttatttggatcttctctcttctttttttggttaatctcactaatggtctatcttctttttttttttatcttttcaaagaaccagcatatcgtttcatttatcttttgtatttttgttgttgttgttgtttgtttcaatttcatttagttctgctctgatcttcattatttcttttcttctgctgggtttgggtttggattgttcttgtttctccaggtccatgtttgtgctctttcagacttccgatgtaggcatttaatcctatgaactttcctcttagcacaaccattgctatatcccagaggttttgataggttgtgtcactattatcattcagttcaaatatttttttaatttccatcttgatttctctgttgacccagtgatcattcaggagcaggttatttaatttccatgtgtttgcatggttttgtggattcctgttggagttgatttccaattttattccactgtggtctgagagagtacttgatataatttcagttatcttaaatttactgagacttgggccaggcacagtggctcacgcctgtaatcccagcactttggaaggccgaggtgggtggatcacctgaggtcaggagttcaaaaccagcctggtcaacgtggcaaaaccctgtctctactaaaaatacaaaaagtagccaggcatggtggcacgtggctgtattcccagctactcgggaggctgaggcaggagaattgcttgaacctgggaggtggaggttgcagtgagcgagattgcaccactgtattccagcctggtgacagagtgagactctgcctccaaaaaaaaaaaaattactgagacttcttttgtggtctatcatatgatctgtcttggagagcattccatgtgctgatgaatagaatgtgtattctgcagttgttgggtagaatgttctgtaaatatccattaagtccatttgttgtagggtatagtttaagtccattgtttctttgttgactttctgtcttgatgacctttctagtgctgtcagtggagtattaaagtcccccactattattgtggtgccgtctatatcatttcttaggtctagtagtaattgttttataaatttgggagatccagtgttagatgcatatatatttagtattgtgatatttccctgttgggctagtccttttaccattatataatgtccttctttgtcttttttaactgctgttgctttaaagttagttttgtctgatataagaatagctactcctgcttgcttttgttgtccatttgcatggaatatcttttaacctttaccctttacctgaaatttatgtgagtccttatgtgttaggtgagtctcttgaaggcagcagaaacttggttggtgaattcttatcctttctgccgttctgtaccttttaagtgaagcattgaggccatttacattcaatgctagtattgagatgtgaggtactgttctattcattgtgctatttgttgcctgaatactttgtgttttcttcattgtattattgttatatacacaacatgtatgtattgtgagatttatgctttaaggtcctctgagatatatgctttaaggaggttctatttttttctttttttttttgaggatttgtttcaagatttagagctccttttagcagttcttgtagtgctggtttggtagtggggaattctctcagcatttgtttgtttggaaaagactgtatctttccttcacttatgaagcttagtttcactggatacaagattcttggccgataattgttttgttgaaggaggctaaaaataggacctcagtcccttctagcttgtaagttttctgctgagaaatctgctgttaatttgataggttttccgttataggttacctgatacttttgcctcactgctcttcagattttcttttgtcttaactttagattacctgttgactatgtgcctaggtgatgatgtttttgtgatgaatttaccaggtgttctttgggcttcttgtatttggttgtctagatttctagcaaggtaattgagggagttttcctcaattactcccagaaatatgttttccaaacttttggatatctctttttccttaggaacaccaattattcttaggtttggacgtttaacatagtcccatacttcttggaggcttttttcattttttaaattcttttttctttgtctttgacggattgggttaattcgaaagccttgtctttgagctttgaggttctttattttgcttgctaattctactgctgttactttccagtgaattttgcatttctctaagtgtgtccttggtttccagaagttctgattgtttttatttatgctgtttcactgaagaatttttctttcatatactgtatcctgttttttatttctttaaattggacctcaactttctctgccgcctccttgagtaacttaataatccactttcagaattcttactctggcaattcagatatttaatcttggtttggatccattgctggttagctagtatgatcttttgagatattaaagaaccttgttttgtcatattaccagaattgtttttctggttccctctcatttgggtagactaagtcagagggaagatctgagactcaaggactactgttcagattcttttgtcttacagggtgctcccttgatgtggtgttctcccccttctcctaggaatgtggcttcctaagagccaagctgtagtgattgtttttgctcttctgggtctagccacccagcagagctacccagctccatgctggtactggcaagtgtctgcagagtcctgtgatatgatcggtcttcaggtcttgcagccattgatacctgcacctgcttcagtggagttagcaggggagtgaagtggactctgtgcgggtccttggttgtgtttttgtttagtgtgctggttgcctcccagggagcctgcggtggtgatccagttccttcaaagggtctgtgaattatctcagctttcctggtatgttcctgcggttgttcttggaacaaaagttcatgatgtaagtctccacatgctactctatccttccaaatggaagctgcaactagtccttcctcctatccaccatcttggaaaaactggcagatgtgcattttcaggatagttcctggtcattgttttcagtaattaatggtgaagagtagattgctaatcttagtaagaatctagtgatgtttttgctgggtgatctcaagtagatggagagttcagatcagcccggccttctcctcttaggcatatttgtaactattttttatttgggtaaatttatggggtacaagtataatttttgttgcatggatacactgaatagtggtgaggtcagggattttagtgtatccatcacctacatagtgcattgtactcagtaaacaatttctcatcatcccaccaattcccagccttctgagtttgcattgtctatcattccacactccatgcccatgtgtgcaaatcatttagctcccacttctatgtgagaatatgtgacatttgactttctgtttctgagttatgtcacttaaaataatggcttccagttccatccatgttgctacaaaagatatgatttcattctttttttatgaccaaatagtatcccattatgtgtatgtactacattttctttatccagtcatccattggtggacacataggtggattctatatctttgctattgtgaatagtactgcaataaacatacgagtgcagatgactttttggtataatgatttcttctttttttttttttttttgagatggagtcttgccctgttgcccaggctggagtgcaatggcgtgatctcgactcactgcaacctccgcctcccaggttcaagctaatctcctgcctccacctctcgagtagctgggattacaggcgcgcgccaccacacccagctaattttttgtatctttagtagagacagggttttactatgttggtctcaaactcctgacctcataatccacctgcctcagcctcccaaaatggactacaggcatgagctaccatgcccagccaattatttcttttcctttgtgtagatagccagtaatggaattgctagatttaatggtagttctatttttagttcttgagaaatctccatagtgttttccatagaggttgtactaatttacattcccatcaacagtatataagcattttcttttttcccttttcttgccatctgttattctttgtctttgtactagtaaccattctgactggtgtgagatggtatctcattgtagttttcatttgcatttctctgatgattactgacgttgagcattcttccatatgcttgttgtccatttgtatgtcttcttttgaaaaatgtctattcatgtcctttgcccacttttaaattggattgttttttgtgttgctgaggtgtttgagttctgcatatctgtagctattatttaatctttggggttctgtgtgttgtgtgtggtgaccctaaagaccagacaggaaggttctcagacttcctgagagcaggcagatgtcaggaccctgtggatatctgaactttatccagtgtctgtgctcagaggcctgtggactgtgtagccctggacagttcacaaagcccatcaatgtatggggctgtatttaacctcccacgtaaggatgcggagtcaaggtgtgggtaggtcgtggtttccttggagtcagcttccaaattaaataccagaggtgtggctttatcccagtttttttctacccaaatgctgttggtttcattttagtgcagccaccagaaataatttttgcatcattttctttttctcacaatgtcacatgtctaagaataatcctatgtttgaatatttagcttggtttcctaatcccaggtataaaatctggttttgctgtcctgaggagcagtagaaagaagtccctgcatccacctcagtaggtttacatggagatagaaaatgtcatcatgtttgattatttggaccttaccttgtagcacttcactcttgaggagggaaatcagatctctggtggttggtaaaatctgctgaagaattcaccttatcatgattttgttttactcacagaatcatgtcaaccctgccatggacttcacgcagactccacctgggatgttggctctggacaacatgctgtactttgccaagcaccaccaagatgcctacatccgggtaagcaagaagccccttttcagatattgtgtgtttcctactcaatgttaatttcaaactcacaaatacggagggattacctttagatgagtgaccccatattttctgtctttcttagtaaactaaaaaaaaaaaaaaaatcagaattaagtgagatcaatcaggggactgaaatgaggattttaacttttaatttttttatttcgatgacattaaaaaatacggtagatactaggaaaacatttcatatagtccaatattgaattatgacaaaaactcttaaataacaaggaacaaaaatgaactacctaccaaaaacttgcatgactccaaattcagaggctgttgagtctgacactggaggaacaataagataaacagaaacaaagagaaaaatgggagagatggggaaggcagagaaatgccttcttacatttcacgtcagactcgtcaaattctagtcacgaaggtagattaatttgtgggtggagcagaaggaagtgggggactctattttctctgtgaaatggaagatgccacctgctgaagatgccatccgctgactgggcattgctggcatggagaataaatgaatggaagcctaaggcgacagtggtggagaaggctctcatctatcagggctgctcggttggagccctggatttgtgctgacacctctcccctgtcctcagggtgaagaacccagattcagtcaggatgaggtagatccaagattgagatcagggaaggatatgaataaatggggcaggggaattggtgagtggttaaaatgatgactagatgtaagcttagaaagtatttgatgaacaagttgcctaaatcaggaagagtaaggctgaacttaaaatatggtaagagcatgtccattaatctcatattctctgttggattctctgtagcactggctccctggagacctgggttcgagcctggcactatcatcatctagtgatgtcagtgtgggcatttcctttggtctggcctcatgtttcctctgtaaaccagagagacttgatggttcttagctgggacagtatttattcccctagagagcatttggcaatgtgtgggcgtgtttcttcagttgtcaccatgcctagtggtgtgctactggccaaaatctgtaatctatgggaccgtcggcacagtgaaaaactgtaccacccagcagtgacctccttgaataaggccatgccagatcactgagttctctttaggaaatatattttaaatctgtgtgttgttctatatatatggagtttgggaagctttgacctattctgaaatattatttgtaatctgaatatatagagaattttattgtcatttctctgaaaggtttgggatcaggtgtttggtcagaaatacagtcccacataagaaaattgtttttccataaaactttggtttgacttatatgcgaatatattttttgcacagatgatttctaataatgtaatctgcttttgtagtaagtaaattaatatttttgagataccatgtagtatagccttggagagttgagcgtgaaaagtagaagctaagtagaaattgaatttaccactaactgattaatgttcatggatgagtgtttctaaaattggagcttattgatgctgaatgtattgttaattgcataagaagcatatgtctcatgaaaagtaatttaatgttttaagcctgttttcctcaatgtgttctttaaacattgtaagtgaaatgaataccatggcagcctgacaaaactttatatttgatcaggacttaaaagaaaaaacctatttgtaaagagaagtgtggcttttggtccacatgcacttttctttattggttagactttcctgtatctcagatgactttgttgatttctcagaagtgtcctttccctaattttttctgtgtcccatttgactttggggcatttactagatagaaagctaaggctatttatgtgaatgcatggggttagtagagcatatataaattctgaagatctctgcaaggaaattttagggtgactttgacaatagatatctccatgatatggcagtagtgctgtaggtagtgaaaatagtgatctgggcagctaattaaattttgattcatgagctcaatggtcttttctgaaacataaagatgggctcaatcttttcaatttgcattttgataaaaatccgcctttttgaggatgtatatcttctctatgaatgcagtttttcatttattatttatatctttcatttgataaatgcttattctgtacctgaatatagcctcactattcactctctttgccagtcagatttatagttgagattaaaaaaaaattgtaacacacacacacacacacaaacacatgtatatatgcacaaatattccctcgttgcccttgtcactcccaggtatcatggtccctcacccactttctagccatatgttcccaagttgttttttgccctgtgttcaacttgcctgccactcacttttcagcatcctgctccaagacttctctccattgctttctggaagctgtattgccaaatgcagagcactttcctcatcctttgtctcgttggccttgcccttgacacctgacactctctagtgaccagtcctctcttgcccagcagccagtgatctgtcttggctctgttgctgaccgttgctcttagtctctctggcaggtttctcctccacctgcccatgaaatgcacaggcccccaggactctgtctctggacctttgcttgtctcagtccctcaggctgcacatttcctaagtaaccatcaaatgcccagccatgagccaaaggatggggattcctcaagaaaacaagttgctcatgggtcctgacattgaggagttcactgtctagagatcaaaagtagaggtggtggtggtggggtggggggtgaagagacaaataccaggcagtttccaagtcacttgtcatgtgtcttgattgagtatgctgggaacacagaggaaagtcaccaacacagatgtgggggtcaggtcaggaaagcttcctggaggaagtgacatctaggctcagaactgttgaatagtactagttaactaggtgaagggaagagatggagagtactacctcatgtggatggaaccatgagagcaaaggtacaatggtgcctgctttgttcagggagccacagtagtataggatggccagggcagggactggcaaacggggcatggcttgtgaggcaaatgtgctacttcagtggggatgtcttaagccatctgaagaggtctgttggacctaaaggcagtgaagaatttctgaagtgttttaaatgaagatgagaattaagtttagacaaatcactgtcccgctagaaaaccaatgtgagaaatcaagaccagaggcaaaaataaaatgtgggaaattatagagaaatggagataacttgaactagggtagtgggagtggcaatgaaatggagcagtttgaatgagttactttggaactaaaatcaacttgaccttctccgaggaagagggaggtttctgccttgagtgggaggtagacagtggtgccattaaggaaacagataatgcaggtctgtgaaggggcaggcatttggaccatccagactcttacatgcatgtgggacatctgtctaggaggacatatgccgtaggcagtgagatctgggtggctgagctgagacccacgtagacatcacaatctatattctaactccttaagcattcttattccctccaattcattcttctgtattgtcacaatattatcttagtggcctccttgctaatgtctggaaccttcaaacccatcttccgtgccagttgctaggatgatcttcctaaagagttccgagtgcttcaagggaccatgcctggcccacagcctatctctgtggctttatctcttgctaccaacttccctttccctctttccatccccccaccaccatagtagcctttgtctatataaatgatggtaggccaaactagccaggcaagtctctaccactgtgtctttgctcccgttcttgtttctgcttgagtgcctgtcccacatcatgtgcctgttggacagccctcatggcaaaggccatgttctgtctgaagaagacttcctgaccctctacccggatgactccatccactctctttgcaccgtggacacacaatttaaatcctagaacattgtacagccttaaatgtatttactttctatttcccctaattgattgtaaatgtcttgtgagcaggcaccaaggttcatttatattctagcccctggcacagagcctagcacatagtggcttttaatcatttcttgtaattcacatgagtaaagagctttttttagttctggtttaaatagtctcttgaccatgataaatgctttttttaccattggagaatcatggcttttgttcctcctaacagttataaaggtatatttttgatatgtgaattttgtgatggacagcctggtttctcatgttatatttgaataaagttttgtaactgtgtactgatgaaagcagtgggtgtaactgaattaccccaaaacttggacgggcacagaacatgaggaggaattgcaaatctgagtatcctactgtgcatggagtaaaatctggaggcatagcatgatttcagacttccgagtcttacttactctgggtataattgcttttactttttctagaaatgtttcactccccagctttccagaccagaggaatggtacaaggctgtctcaataaggagacaagtggagggagggttcttggctcatgcccatgagcctgctgtcattattttcagagacaagataatggtacagagttgagcgtgttgtagatgttttgtttttctttttttatgtttatgttttttgtttgtttgtttgtttgtttaagatacagtctcactcttttgcccaggctgcagtgcagtggtgcattttcagctcaccacagtctccgtgtcctgggttcaagtgattctcatgcttcagcctcccaagtagctggggctacaggcacgcaccaccatgcccagctaatttttgtatttttagtagagatggggtttcgccgtgttggccaggctggtcttgaactcctgacctcagatgatctgcccgccttggcctcccaaattgttgggattacaggtgtgagtcaccgagcccagccaaatttatgttcttgatgtatttaattttattcactgggaactactgaaaaacccaaattacctggttttagcttggctgaagacctatgctggccaatgtgggagccaagattcaaccacaaagcaggaagcaatggcaaggaaacctagggctctctcaaaggtggaactggaataataagaaatacttaagaaaaaggctatgactagcagatagggtgatctcaggataatgtaattcttcatggtaatattcaccttcccgtttggccagagcaaatgaatacctagtgtgggtttggtaacatgcaagacaggctgcatagttgagctcagtcttcaagtaatccctaggaacaagcattgttatcaccattttataaattcaggagctgggacttagagaggtacagagagtttggtctgtcaaacagccagtagacaagcctccaaatctcaggcttcttccagttctgtagcctcgtctctgggcttggagtatgatgagggaaacagtgttgtcattcttggaatggagggaaaggggacagagtcaaagagagaataattagaaaacatggaaagtccacaggactatcaaacaagtcgtcatattcagttaaagatcttctgaagtctagcatggtcaggaagccatttctaaagatacttgattgacacccaaaagatgctattttaaggaataagtgggcccagggaaggtatcattgcaaagcttttcatgtgtcagagatagtctttagtttcagagtagtgataggagaagtaacatgcagaagtattcagatgttcagaacctattgtcagtcatctgacccctcttggcattacagtgagacagaagcaaactgtgcattaatcccaggctctaaaaaagttagataaacatttaacgcccaacaataaaatccgaatgcatgcaaatgagatgtttctattattgattacatctttttcagagggaaaaaatacacatagaaaacagaaacagtccatcttcttaggcgctaaaaagtatccaactaaaagaagaaaaatccttttaacattcatattcattcattcattcattgactttttcatgaaatattatcaaacacctaccacgtgcctgcgtggagccatgcgcagtggctgtggtggtgaagaaaggcaggatctgattctgaaatacctgacatggaaaagcaatcaagtgaaggcagtatttgtttatttgttttttacttgagagtttccttgtttcctttgggatttttagatgtgacttatgctgggcacaactatcaagttataaaaacgttgcttgatacttctttgcagtttttcacaatatattgagcaggtaaatatttcattattttgtaagttattatactgtttatatcagaatcacttaggcttgccccctttcccagtgacctaattttaaacaacggcactgcttcttagagaagtattctgttgggcagtcagtatggaatagaacaagcctgaccccttttctctgtttgattcggcatggtgctatgtgataaataaaatattttcttttcttttatatatatatatatatatatatatatatttaaattatactttaagttctagggtacatgtgcacaacatgcaggtttgttacatatgtatacatgtgccatgttggtgtgccgcacccattaactagtcatttacattaggtatatctcctaatgctatccctccccactcctcccaccccacatcaggccccagtgtgtgatgtcccccttcctgtgtccaagtgttctcattgttcagttcccacctataagtgagaacatgcgatgtttggttttttgtccttgcaatagtttgctgagaatgatggtttccagcttcatccatgtccttacaaaggacatgacctcatcattttttatggctgcatagtattccatggtgtatatgtgccacattttcttaatccaatctatcattgttggacatttggcttggttccaagtctttcctattgtgaatagtgccacaataaacatacgtctgcatgtgtctttatagcagcatgatttataatcctttgggtatatacccagtaatgggatggctgggtcaaatggtatttctagttctcgattcttgaggaatcaccacactgtcttccacaatggttgaaccagtttatagtcccaccaacggtgtaaaagtgttcctgtttctccacatcctctccagcacttgttgtttcctgactttttaatgattgccattctaactggtgtgagatggtatctctttgtatctctttgtgcttttgctttgcatttctctgatggccagtgatgatgagcatttcttcatgtgtctgttggctgcataaatgtcttcttttgagaagtgtctgttcatatccttagcccacttgtttatggggttgtttgattttttcttgtaaatttgtttgagttctttgtagattctggatattagccctttgtcagatgagtagattgcaaaaattttctcccattctgtaggttgcctgttcactctgatggtagtttcttttgctgtgcagaagctctttagtttaattacatcccatttgtcaattttggcttttgttgccattgcttttggtgttttagacatgaagtccttgcccgtgcctatgtcctgaatggtaatgcctaggttttcttttagggtttttatggttttaggtctaacatttaagtctttaatccatcttgaattaatttttgtataaggtgtaaggaagggatccagtttcagctttctacatatggctagccagttttcccagcaccatttgttaaatagggaatcctttccccatttcttgtttttgtcaggtttgtcaaagatcagatagttgtagaagtgtggtattatttctgagggctctgttctgttccattgatctatatctctgttttggtaccagtaccatgctgttttggttactgtagccttatagtatagtttgaagtcaggtagtgtgatgcctccagctttgttcttttggctcaggattgacttggcaatgtgggctcttttttggttccatatgaactttaaagtagttttttccaattctgtgaagaaagtcattggtagcttgatggggatggcattgaatctataaattaccttgagcagtatggccattttcatgatattgattcttcctacccatgagcatggaatgttcttccatttgtttgtatcctcttttattttgttgagcagtggtttgttgttctcctcgaagaggtccttcacgtcccttgtaagttggattcttaggtattttattctctttgaagcaattgtgaatgggagttcattcatgatttagctctctgtttgtctgttattggtgtataagagtgcttgtgatttttgcacattgattttgtatcctgagactttgctgaagttgcctatcagcttaaggagattttgggctgagatgatggggttttctagaaaaagagtcatgtcatctgcaaacagggacaattggacttcctcttttcctaattgaataccctttatttctttctcctgcctgattgcgctaggcagaacttccaacactatgttgaataggagtggtgagagagtgcatccctgtcttgtgcaacttttcaaagggaatgcttccagtttttgcccattcagtatgatattggctgtgggtttgtcatagatagctcttattattttaagatacgtcccatcaatacctaatttattgagagtttttagcatgaagggctattgaattttgtcaaacttttctgcatctgttgaggtaatcatgtggtttttgtcgttggttctgtttgtatgctggattatgtttatggatttgcatatgttgaaccagccttgcatcccagggatgaagcccacttgatcatggtggctaagttttttgatgtgctgctggattcggtttgccagtattttactgaggatttttgcatcaatgttcatcaaggatattggtctaaaattctctttttttgttgtgtctctgccaggctttggtatcaggatgatgctggcctcatgaaatgagatagggaggattccctctttttctgttgataggaatagtttcagaaggaatggtaccagctcctctttgtacctctggtagaattcagctgtgaatctgtctggttctggactttttttggttggtaagctattaattattgcctcaatttcagagcctgttattggtctattcagagattcaacgtcttcctggtttagtcttgggagggtgtatgtgtcgaggaatttatccatttcttctagattttctagtttatttatgtagaggtgtttatagtattctccgatggtagtttgtatttctgtgggattggtggtgataccccctttatcattttttattgcgtctatttgattcttctctcttttcttctttattagtcttgctagtggtctatcagttttgttgatcttttcaaaaaagcagctcctggattcattgatttttttgaagggttttttatgtctctatctccttcagttctgctctgatcttagttacttcttgccttctgctagcttttgaatgtgtttgctcttgcttctctagttctttaaattgtgaagttagggtgtcaattttggatctttcctgctttctcttgtgggcatttattgctataaatttccctctacacactgctttaaatgtgtcccagagattctggtatgttgtgtctttgttctcactggtttcaaagaacatctttatttctactttcattttgttatgtacctagtagtcattcaggagcaggttgttcagtttccatgtagttgagcagttttgagtgggtttcttaatcctgagttccagtttggttgcactgtggtctgagagacagtttgttataatttatgttcttttacatttgctgaggagtgctttacttctaactatgtggtcaattttggactaggtgtggtgtggtgctgagaagaatgtatattctgttgatttggggtggagagttctgtagatgtctattaggtccgcttggtggagagctgagttcaattcctggatatccttattaactttctgtctcattgatctgtctaatgttgacagtggggtgttaaagtctcccattattattgtgtgggagtctaagtctctttgtagtctctaaggacttgctttatgaatctggtgctcctgtattgggtgcatatatatttaggatcgttaactcttcttgttgaattgatccctttaccattgtgtaatggccttcttcgtctcttttgatctttgttgctttaaagtctgttttatcagagactaggattccaacccctgcctttttttgttttccatttgcttggtagatcttcctccatccctttattttgagtgtgtgtgtgtctctgcatgtgagatgggtttcctgaatacagcacactgatgggtcttgactcattatccaatttgccagtctgtgtcttttaatcggagtatttagcccatttgcatttaaggttaatattgttatgtttgaatttgatcctgtcattatgatgttggctggttattttgctcgttagttgatgcagtttcttcctagtctcaatggtctttacaatttggcatgattttgcagtggctggtaccggttgttcctttccatgtttagtgcttccttcaggagctcttttagggcaggccttgtggtgacaaaaatctctcagcatttgtttgtctctaaaggattttatttcttcttcacttatgaagcttagtttggctggatatgaaattctgggttgaaaattcttttctttaagaatgttgaatattggctcccactctcttctggcttgtagagtttctgccgagagatcagctgttagtctgatgggcttccctttgtgggtaacccgtcctttctctctggctgcccttaacattttttccttcatttcaactttggtgaatctgacaattatgtgtattatgtgtcttggagttgctcttctcgaggagtatctttgtggcgttctctgtatttcctgaatttgaatgttggcctgccttgctaggttggggaaattctcctggatgatatcctgtagagtgttttccaacttggttccattctccccgtcactttcaggtacaccaatcagacgtagatttggtcttttcacatagtcccatatttcttggaggctttgttcatttctttttattctttttttctctaaacttctcttctcacttcatttcattcatttgatcttccatcgctgataccctttcttccagctgatcgaattggctactgaagcttgtgcatttatcatgtggttctcatgccatggttttcagctccatcaggtcctttaaggacttctctgcattggttattctggttagccatttgtctaatctttttttgaggtttttaacttctttgcgatgggttcgaccttcatcctttagctcagagaagtttgatcgtctgaagccttcttctctgaacttgtcaaagtcattctccgtccagctttgttccgttgctggtgaggagctgcgttcctttggaggaggagaggcgctctgatttttagaattttcagtttttctgctctgttttttccccatctttgtggttttatctacctttggtctttgatgatggtgacgtgcagatggggttttggtgtggatgtcctttctgtttgttagttttccttctaacagtcaggaccttcagctgcaggtctgttggagtttgctggaggtccactccagactctgtttgcctgggtatcagcagcggaggctgcagaacagcgaatattggtaaacagcagatgttgctgcctgaatgttcctctagaagtttcgtctcagaggggtacccggctgtgtgaggtgtcagtctgcccctactggggggtgcctcccagttaggctacttaggggtcagggacccacttgaggaggcagtctgtccattctcagatctcaagctgcatgctgggagaaccactactctcttctaagctgtcagacaggcacatttaagtctgcggagatttctgctgccttttgttcggctatgccttgccctcagaggtggagtctacagaggcaggcaggcctccttgagctgaggtgggctccacccagtttgagcttcccggccactttgtttacctactcaagcctcagcaatggcgggtgcccctcccctagactcgctgccgcgttgaagtttgatctcagactgctatgctagcaacaagcaaggctctgtgggcgtgggaccctctgagccagacgtgggatatgatttcctggtgtgccgtttgctaaaaccgtcagaaaagcgcagtattagggtgggagtgacccaatttcccaggtgctgtttgttaccccttcccttggctaggaaagggaattccctgaccccttgcgcttgtcgggtgaggcaacgcctctccctgcttcgggtcacgcttggtgcgctgcacccactgtccgacaatccccagtgagatgaacccagtatctcagtttgaaatgcagaaatcacccgttttctgagttgctcacgctgggagctgtagactggagctgttcctatttggccatcttggaacctggaccccaaatattttcttaattaaactgctacacaaccagttgataaaatcctactcaacaaagctgttacccaacggaatttgtataatcttgaggtttccaggaaaaaatttaaaagtaaatcttggaaactgtttgttccttacatatctggcaattcttttttgttttctagttttatcgagatataattgcttacccaaaaaatcacataattaatgtatacaatctggagacagaaccttgcttcagcgtccctcataatttatgattaacatttcatctagttggaaaatctttgcatactggctgactgttatagaagataatgaatttcctgaggggggagaatagaaatgcctttaaaaataagattaatcacaatgttttcgtgcagttgtgagacagagcatatatatgtttctaatattatgccaaatcagaagacaaatatttgtaatatgtcaagtaaataagtctatgagtaaagatggctatttctactgaagaattgttttctcaagattgtttcattatagccacttttttaaacagatgaagaatttaaagtatgtttagtttacactattttaaaacctttaagtgggtttttcctcctcatgatgcaatgcatattacatcatacttacaaaaaatagttgggagaaataatgatttagatcctaactaatggttgggacagggaggcctggattttttgaggcagcaacctaaagaaaatgctctgaaattacctagcgtgagaaaagctactatcttttgagcctttactatgttctgagtacttaacatacattatttgtaatttcccttcaatgttcccagacatgggaagataaagaaaccttatgccctttccttccagtctgtagatctctctgttcttctcctcaaggcccacctcaagttcagagtcattttggggaatctcttttcagcctttccagtcagggagctaaacatcaatgatcacagcaatcacatgtttggagctcactagaacaactaagctgagtattttcatttatttcttgcaccacccctctgaggttgccactgttactgtttgcattttacagacgaggaaactgacacatggagaggttaagtggtttgtccaaagtcacacagctaaggtagtaccagagctgaattttaaatccagataatatgtgtccattgtccatactgtgtgcttttgagaggcttatagattcatatggaggtggtagccacagttcaaatgagtcctacagatgtgttttgcttcactgacccagtgttattaaaaagaagagaatttgattgccttttttcagggcttacactccctccccaattaacttagagccccagacaccttcttgtattatggctgactgcttcatgctttctggttatctgcctggtacttgaaggcactcgagttagtgcccgttgatgatgatagtctgtaataacatttgtgaagttctgagcacaccgccagcacatagaaggtgcttcaaccatttgagttgattgttcccgttcccactccttaaagtagtacttgattgatgtacagccttctgagagtttcatatgtatttgctcggtgtttatcttttcatccttgtaaactcccagaaagcaggcatttcatctttggttgggtgtttattccctggctgagaatgaaggactttaatcccaacctcctgagactgaagaaaaggaaaaggcatgtttcccagtttctcctgttgtgagttttaaagaaaaaagtcacacgagtatattataaacagactgcactggaccagtgctctgggagctctgagcatcatcagccctctgtaccaggagtcagaccatagagtggatccctcgcaggacaacagtatgcattgaagggaacaggaaccaagtagcctctgtgcattaaggcagggtgctggtggaggcgacgccaagactttaaaataaactaagggacttctaacatttcaagggggaatttggcggttccccaagcgacataattacaggacagtgtgtaatgtgcaattaaacttaactatgaagcaaatgattggaataatgcttagtgcacaacagttttttgttcccattgtgctgacagagcctccccttctctcgtccctgaaatggcttcaacagcaattgctcttcatttttttaaaaataaaattatatgttgccagttaaacacacaattccatgtaaaggaacctttttttatctgagtgacatttttcttctaggtgatgtggagaaaggattcagtttagaataacaaggaccccaaaggcacagccttgttgggacgtttgagtttgaaatgattctttgtctcataattcatttacttttttcctggctttaatttttgttctttctttaaccaaggtccacagcttggaggcttgtttgtatatacaggattttttcatgttttaaaaatagtggcattaatttcgttgattgtgaataaccaagctgttactgccaaacaatcgggaccccttgagagtgtgaatatgtgattagatttactaattgagctggaaggaagaatttctgacttccaaagccagtgatttgaatggaatgcttcaagcatgaggatgagatcattgttaaatgtgggcttggttttatctcagaagaccccttgtcccagggagggagggcagattccacaaacctctattagctgactgtagcagtgcctgcgtggtgtgctcacaccacctcggatgctcacctgtgttcttgtggtgctggatgaggtgtctgaaatctgaagcagacctgaaagctggtagttatctccttgtctctcttggtaccaccccaagctgagcattaggttcagaatgcttgcttgtttgtttgccgttgtctcaggttaactgaaaatactacagcattgcagaaaaatccaaacagctccacgtggtgttttgaaatttatcccaactgtaggctgagtgacccgcaggttggacagtctgtgaaagccccaaagtctcagtgtttcctcagtgtcaggacctactttagtgatctccaggtccagggctaagatctcaggaacataattatctctccttttttctctctcttcctcccacaacttgatggagatgcctctcactgggcctctccaaatatcctccatcagatgcaggatgtagcctgccctcttgttgcggagcttcttgccagagataatggtgatctccttgcccacacactcgttcctgtggaagtcattgccgaggcacatgtagtacttttctaggatgacccaggctgcctttccatggttttgatgcaaaagcagcccatcttggagagtccttggtgaaagaggtttcagactttcttacttagcattctccaaaggttttttgttggtggtggtggtggtttttctcttttctttttttttttttaattttaaaacacagtgggactttaaaacagtgatggatttgttgagaaaaaagtgaagctaagctgtatagtgaactatatgtagttgacatattgtaaacacaagtctaatgtgaattgaaaggttaaaaacttcagaaggatcacatgttcctgactccctcactgaggtaccagccaagacttagctcacagtaactgttgtggtttctctatcttagatccagttagtatctttccattatttctccaacccagttctccaaattcagcccatattgtccatttttatgtcttgtttagctagttaaatatttattgagtacagtacctgctctgtgacaagccctctttctttctgctgtaattgaccaagcttccacctttaaatgtgcatttttctaccttagctgtgcagagctcagcagctgctgtgctggggtttcgctatttcttctcccttttctgctttaattgttgtaatgcaggagttcaaagaactgcagctcacttcttatttctttgaaggggaaaggtttctgggactcctctctcttctgtttttctcaagagaatgcagacctctctgcctttttaattttttaattaatagacattgtgttttagaacagttttaggtttacagaaaagttgagcaaaagtacagagggttcgtatatatcccatctctcatttctcccacacacagctttctctgttattaacatctcacattagaatggctcatttgttacaattgataagccaatatcttgcagtcttgctgtaattgtttattagttccaagattttatgtattaattccttggaattttctacatagacaatcatgtcccctgtgaacaaagacagttttgtttcctccttcccagtctgtacaccctttttttttttttcttattgcactagctaggactaccagtaagatgttacataggggtgataggagcgaccatcttagccttgatcctgatcctagggcagagtcaagtttctcatcattaagtatgatgttagccataagttttatgtagatgttctttatgtagctgaggaactgctctattcttagtttgctgagagtttttttttatcatgaatgagtgttagattttatcaaatggcttttctgtatctattgataccattatacaacttttcttctttagcctgttgatacaatggtttacattaactgatttttgaatgttgaatgagccttgcatacctgaaacaaatcctactcggttgtggtgcataattctatttatagattgttggattctatttgataattttgtgaaggatatttacatttatgttcatgagagctatatagatccgcattttttttctttcttatgcctttggttttggtattagggtaatactggttttatagaattagttaagaactactccttctgcttctaccttctggaacagattgtagagaattggtatcattttcttgtttaaatatgttatagaattcaccaatgaaaccatccaggcctgatactttccattttggaaggtcattaattatttattcaattcctttaatagatataggtctcttcagattgtctatttcttcttgtgtgggttcttgtagattgtgtctttcaaggaattggtccatttcatttacattatcagatttttgagcatagacttgttcataatattcctttattatatacatgagatccataaagttgactcttctttcatttttgatgctaataatttatcattttcctttcatcttgttgagcctggctagagatttgttgtttttattgatcttttcaaaaaactagcttttgattttactgatttttctatattgctttccagttttcaatttcactgatttccactccattatttttttttacttcttttcttcagcttactttagatttaatttgtatttttttagttttctaaaatggaagcttagatgcttgattttgtatatttttctccattgcttgaattcctcattgatattttgctacaaatatccttctagcaatggctctgccttccataggggttcagcatggctaaacctactcagaactttgctatttaactgtttcatggcgctaaatatgggttgccttgataaggcaacccagtgactaaagtctctggctcaatgagttactctttattccattaagacccagttaccaacaaactaaccccagcaaattctatttactctactttcaatcctattgactctactttcaaaatcctattgactctgctttccagaaacctacctcctttccccacttctaccaccattacagtaatccagtacatcaaacctctctcctgtatctcctgtaatagtgtaacagcctctgattgatattgcctgctcccacacttgctcatcttttctgtcttcaacacagtagccagaacgttaggaaagatgccatagtgattcttccagtattggtcagatcacatcactcatctgcctacaacctccagtaactcagagtaaaaacgttcagcacttttgccacagctctcaaggctctgcagtgttctggctttccagccttacgtccttctatcctactccttcctccctcaactccacccacagagatcagctagggctgccataacaaaatatcacatactgggtggcttaaactacagaactctattttctcacagctctgaaggctggaaatctaaaatctagctactggcagggttggtgtctctgaggcctccctttttggcttgtaaacggctgccctcttgctgcctctccacatggccatccttctgtgcactcacaccctgttggcactgcttcttatgagaacaccaatcatactggattcggaccctaccctaatggcctcatttgattttaattacctctttaaaggccctatcttcaaatacagtcacatgctatacagcgggttggagcttcaacatgtgaattttggaagggtgcaattccgtccatagcacccttgttggccgtgaacataccaggtacctctggtctctgggccttttactttttgctttctctcctaggaatctgttcctgggtagccacatggctcattgcctcacttccattagtctctgagcagctttctgtcacctccagatataaagtactgatttcatcctcttgctccctgtctaccttacctcctttatttctctcaaaatttaatgtttcttacatgctcgatattcactgttttctttatttcctgttcacccttactagccagcaaacctcataaaaccacagagtatccatggtgtcactgcggtaccccagtgcccggggcagtgccaggcacacagaagacagtcagcacatatttgttaaatgcatgcctggattgagtgagtggcaggactctgcccagagagttctggtgttccaccttttggcaggattcaccccatggatggaaaccacagaagtagatctctatctggaacacgctctaacctctctggatgcagctgcctttctggcctttgtccgtcctggagtgaaaaccaaattagaaactatatcggtatgccccaaaatggccttgccccagatatgctgatgcttgggcttgggtgagtcactgctgtcttccctttttgaataggattcatgtgaccagagcccagccagtattagcaacctgcctaccaaatcagaagggattttgtattggtataataaaatttaggtggtaatgttcccaaatgtccctttgtattagttaaaaatagcttcccccttaggaactatgctgtacacctggtgcacccagtagtggttgacattgtcagataattttattttttcattgaccttaattttatcaactttttccctgcactggtaaaacccaaggttccaaaatttggcatacatcataaataatagacaatatttttcttgtattttataaagcaactgaaacaattttaataacagatataacaaccctaacaactaacttctctttggttggtttatcaaatgctgctctgtaacactggtcctgatacctggagacttttcaaatctaagactccggttaatgtcattcacacctgtctgcaaacttgcatttgccaagatcaggaaggccagcctagccaatctttcagtacttgactggtgatgctcctatgccacagggctcttgcatgtgcttattctgctgactcagctcctgctttctccatcccttccctgcttgcccacttatccctggattaatcctgcagaacctcaccctttaggctcctctttcattagttttgcttccatgtcactccctttatagcacttagtttggaattatataatcgtatgttttactatttgattattatctctcttaacatgaaatttttgagcaggaaccatctcttttgccctatgcccttactttctgtcactggaccatctaaattaaatgaatgatgaaagataggatgtgttgaatctctgaacagggttgtgttcctcttttttccccctctgaagtcctttatggccttaagtgatatttttcagaagatcaaaactgaagcataacttggaaggaatctctttttccttgacctggtgggaccatcaaattgggcagagtttgagctacacaggataaagccttacaacaaatctcagttatgaaagccatgaagatgtgcatatgttccatgagcagacatgagttctctataagccaatgatgaagaagaccaacatttagttagttttcaacagaagggtcagttctgctgatagcttggcagcttggggctctactctgcatatggtaggaacaaaaagaaagctaaactatattgagtagtgaatgtttccaggctatggttatgaacattttatatgcattaccttattgaattctcactatcattgtacccattttgcagatgagagcgctgaggctcagaaaggtcaagtaaattgcccattgctacaatagatagtaagttgcaaatggggactttggacccagacagctctggtggtgactttttaatactttacattgaatttggtagtatgctagtacaaaagtttttcttaaaagaaaatctgattagtattgcagcatttgctggtttctgtggtatcaatactcctgctgtggccgatttcaagctcccaacagtctatggcctgtaagccttttgaaagtgatgcagcagctggttagcctgctctagcaccagccactggatcttgatggtgcttttgccttctcatgcattatcccatttgctcttcttagcaatatgagggactgtggaatgggtgaggttaacttacgtgtgctgatcttttcaatgggtgagtcatgtgtccagtccataatgccaagtcatggcctgaggtgagaaacactctcttactgactctctcagggcaggagcctgcagagaacgcagagctggaccaagagccccaaggaacctactgtcagaatggctgaggtacaaacaaaagaggatctggacaggaagagagaggcccacatggtcctggggcagctgatgctggtagaatgtggtggtaaacggggtaggagaatgaagtaactgagagtcttttctgaattcagaattttcttaattctctgaattcataaatatgtatttgatgtaggaattcttccccaaagagcttaccaaaaaatcccctacgctcaccaccatacccagccatgcaagggtgcagctgcttggaggagaggaaatcctggattctttcaggattagggagtggctgtcatggtccatggctggggagagccacagcatggggctgattgggaaagtctggggggccccatagcccctttcttcttccatcagaggagactgtggatttttctttcccatgataaatctaggtgagccggtgaaatgattttaaagggaactcctccattgctttgggaagtgtgaaatgacatcatttttagattatggtttatcaatacttatatatatatatttaaattatactttaagttctgggatacatgtgcagaacatgcaggtttgttacataggtatactttaagtggcagaaatgctgagaccttttgacttaacgtttatgtttttagaaacgtacttaaaataaatcattttgcaaatcagcgtaaaagttgctgtgtaaggatgtttgtcattagctccagtcaggtgcagatgtgaggacctctgggcagaggtaggggacctggagatgaagctgagagtgaggctggtgttccctgggcacctgtgcagatacaaatacagccaggcagctgggcctcttcgccttggcaggcttaattaagcacattggatttgtgtccttgtatttcttaaaaaaggaaagaattctgaaatgaagaaaaaaagtagcctttttggcatgtaacatctgcgagataattaatctccctgatatttcaacactgaggctgtttatcacggaggctgcttgggaaccaagagcagccagcctctctgcagtacccactacatacctcatgtggcaggggaggacctggttcatcccagagggcaatctggaggcggtcaaggttgcttcctggtaaaaaccacgagcgttcattgctgtggcctgcaacactctcttcccttttcagttcatatcatcagaggtctttgtccattgttgaggaattaagagaaatgtcccatgcatcttgttctgaagaaatatatttgagtctcttgctttccactttttacttttcacctgaaagcgtccaagagttaactgagaggcaggccagtcttcaggtggggaagaccgggtgggtgttgaggcaatgtttccagctggaatgggggacttggaatcagaactgttaaccaataagaatgaaggggaaggaaatcctattagggggcgtcatcacctaggaaacacgagtcagtttccttttctgcactccaacatggaatgctgagcctggaggccccttcacagattgtcccttctctgttccccaccctcacactcccggatcccctgggccttatctggggaggggggcggcggaggagtgcagagtggaggcagcgcgtggggtgtgtggaagggaaggggacattcttttgctgtgggagttggctccctctcatctcatacattttcctgctgattctcactcacagcatttacaggaagcatttatagcaaatacttgccaaatgttttccataaacacacaacgaaggacatttttcacacattccaatgttctgtaaatgtttattttcacaatacacaaagaaggttgagtgtatggttttcctaaacaagcctttgaagtgtgggctttggcccagggagatttgcttctgagtgttttcatccacgtggccgcattgtccctgggggcacaccaggcacatgcttcaatgcagagagtctccaagtgagttttccccccagcttgtattctctgtgggaatacgtgccctgaatgctgagtagcctctgggttctgagcctcctcctgatgaagaaggaagttagaggttctcagtgcatcacataaacccttgcttctgattaaatccacaaatgacatagaatagggaatatggaggacagggatgactcacttaagatgcatttgaacatatagttgtaataagttatggaaacactcatgctaaagccaggcaagttggtattcatgtaagggatggagaaggtgactgaaccttctgtgggcactgccagcctcaccagaggccagagtcatgactcgtactgtccatgcacttgttcaataactgcttcattactgagcacctactgtatgtgcaactctgctgcaatgtcagagattcacaagtgaggaagtggttcccaacctcaaggggttgactctatcagggaaggtaagacacctatactttaccataatttgggggcataaaatgggaattgttttaagaaagatacagataaaaggttatctcacttgggagaaaactcacttggaaagtctctgcaatgaagcctgtacccggtgtgcccccagggacgatgtggccatgtgaatgaaaaaactcagaagcaagtctccctgggccaaagcccacacttcaaaggcttgtttaggaaaaccatacataaggttttattgcataaggttttatggagaaagtgacatctggattgggtctgaaggagagggaaaattgagacaggtgtgggaggggcagtgtgtcagggaggggtgtcggggaggcagtttccctaggagggagccatgtctgggcctagcctggtaggagagctgtaccagagggagatccttcctctagcaggagtaggcaagatttatgattcatacacagaatgagatgtgatgagatgaactccatttaaaaagctagatgtaataggaagaaaatatttccttttcacatgcttttttaacctcaagtaaaacaacttatggcctaatttcttaattaggtttcagtcaattttttcattgcagctaacttgtcatgtgcataatcagaaaattaacattttctgtttgataatatgttcctgaaatggccaatttattatttgtccagaagaggatagtaagaaatagttctctctcctcacctttccatcttctcaagtccgttctcccaaaccagagtgaatttctaaatcaatgtgctaagtgagaaagtgaggtgagtgggagctgacttagacagattcattttatcactagctttcctggaatgtgtttgttttgtaaaatgaattatattcaaatatgtttcagacaatatatgtggtggttaactttgctttaagacagcagtaactgttcagacaatggtgacaatttctcagtaagaagtcagggttgagaaatgtcaagcttaatttttcatccaacagtgacggtcagacaaaagccaaacctcttggtatctttgcactccggtgaaggagatgtgaggcatttgtattcagtaatgtaatgttgagcgagtcaaaaccctgccatgtgatcttgagatttgttgcttaatactgcccaagatgcataggggcttctctgcttttattcagcatccattttcccattgtaattagtctttcttgcattccacagctcacttctggtgtggaatgttaaaaagatgccttaggagagagtttgacatcagtttcttcttcaaggttgaactcaaggctcaccctctccatgaagccccgtctgcccattgcatctcatgtgcaccttcactgcacaaagtgatacttccttgtgaaaaatgcaaacaatatagaggtacataaaaggaagtgaaagttggcccatcttacaaatcccatgtccttgtatcttccaagtagattgcaagaccctcaaaatggacttttgttcatacatgtatttttaatatctagcaagttgctcagcaataattgcttaaaaatattcatggaatgaatgaattggtcaaagggtaatacactgtagggatgttgggaaggactagggctagaattcagctgatagtttggggaagcagtgccttgattttcaaaatatggaccctggacttgcagcgtcagcatcatctgggagcttagaaatgtgggacctcaggtcccaacccacacctactgagtcagaatcttcattttaacaaggtctccaggtgatctgtgagtactttaaagtttgagaagtactgggattgtatatgtctgcaaagtaatttacaatgtgaactttaaaaaaaattacaatgaagtgtgtgtggtttgcattaaagagtatgcagtagaggagttctgccttaatgataccacaggactttgtaccaatgccacactttgttcccctctgtatgacagggcacacccaatgccctgtccttggctgtcctgtaggactgtcatcctgagccatttcaacacctgtagtgtcttcgtctatttttgctgctttaacaaaataccctagactgggtaagttataaacaatagaaatgtatttcttatggttctggggactaggaagtccaagattaaggcatcagcgggcttggtgtctggtaagggctgtgctctctatttccaagatggtaccttggcgctgcatcctctggaggagaggagcatgatgtcctttcatggtagaagggacagagggcaagtgagagcctcctttcaatcacaggcccttttataagggtgctaatcccagtcacgagagagaagccctcatgacttaatcacctcccagaggccacacccttaatactgttgcattggggattaagtttcaacatgaacttcggaaggggcaccatcattcaaaccatagcagtgttccttctaaacagcacgcaacttgtttaagctctaaggcatggcttcctcatctgtaaaatgcagtcctgcttcaatggcttgtgaggaccaaatgagctaaacgcttgagagtttgcacatgataatcatctaatatgtattaactcttttttgttaatcgagatgaagtgcatataccataaaattaaccattttaaagtaaactgttcagtggcatttagtacattcacagtgttgtgcaatcactacctctatgtagatccaaagacatgatcatcatcccagaaataaccccatacccgctaagcagtggctccccattctcacttctcagcccccggcaaccaccattctgccttctctctctatggattttgactcttattaatgatttttttattagtcacaggaaaaacaaaacaaaccaaaaccaatcagatttatttcttttttgtctactttcattgctttgcatgtctttaaaaacaaaaggtttgctaatgatggaaattgggaatgtagatgtgacagacctgtaagtcagtggttcccacagtgtggtccaaaactggcagatctgtgttaactgggaacttgttagaaaggcagattcgtgagtacaccccagaatgtctgatcataattctgggggtggagtccagcaatctgcattttaataagcttttagaggattctaatagaagctcaagttagagaactattgctttaaataaacctggagtaaagcctacaggtgccccctacacctgtacccatccttggggccaggaacacacgtactggcataaaaggggagattttagcctaccttctttggtggggaagtcagctgggggattgcccctgatacctcctggcctttgaatagtcagcagagcttggcttccctcagtaatgttgtgattactgtgtaggcacaaacagaagtcatcctgctgttatttaatcctttgccctctttgtgctacctgaggtgatgctcaaagggagggcctttcggcaaaacgtggctttgattgctctgtgtgttttgcgcgtcctgcttttgttgcactatatcaaagtgcagggagcatttctttttggttgattaatgttcaatttgaggtctattatgaagctccaggctttaattactataccattacccagtcaattccttgccattttatatttatggcctttattatgcctctgtatgtgcaattgcctaattttattctggaagcatttcacctcattagctgggttttataccattcctctcatttgtccagattgttatttatcttggttccctgtgtgcgttttcttttctttttttttttccaccagtctgactcattatattaatacattctttttctccttttcctgggatgcattgttatttggctcttggaaatatcgctttaagttttttgtccttttccctggtcgtcagttatactcacattcttaacttggtcatttccaaccttctgaaagcccatctcagctgcctggcagcactggccctgtccaaaggcctgaggcctccgcagcctggacataccatggatggccgcctctctctaggtgaccaattaaagctcagggaaggtgaagggatggagtttttacttaagggcatgctggtgaaagtaacttttaaatattctcttaaatccttttctaactctctctccctcaatcccctcattgtctcagaaaacttcaggacttggtttactgacttatttttgtgggttccacctcagaccttctcaatcaaaccctaggggagcctcccagcagcctgcgttcagtatgttctccaggtgattctgacacacattaaagttagaaccacttttcttttttttttttcattctgagaatgctttattttgcagtaccatataattttaacacaccaaatatattttacagtaacaattatattcttcactcaggcataagatcacctgagtttgtggatgtttctcaacaggttgttgtcgtagcatttggacaatgtgattagacaacacccggggaggtggtcatttccaaactggaagttgtccagcattattaggaacgtcttgactggaagaaaattatcgaacattagtttggtcctttctctgttctttttttttttttttttttttttttttttttttgagatggagtctcactctctcacccaggctggagtgcagtggcgcaatctcggttcactgcaagctccgcctcgcgggttcatgccatatgccattctcctgcctcagcctcccaagtagctgggactacaggtgcccgccaccatgcccggctaatatatatatattttgtattcttagtagagatgggatttcactgtgttagccaggatggttttgatctcctgacctcatgatccgcctgcctcggcctcccaaagtgctgggattacaggcatgaaccactgctcccagccttctctgctcttttattttttttatttaatattttttattatactttaagtcttagggtacatgtgcacaacgtgcaggttagttacatatgtatacatgtgccacgttgtgctgcacccattaactcgtcatttaacattagataacctaatgttaggtatcataatgctatccctcccccctccccccaccccacaacaggcctgggtgtgtgctgttccccttcttatgtccatatgttcttattgttcaatttccacctatgagtgagaacatgcagtgtttggttttttgtccttgcgatagtttgctgagaatgatgtagaaccacttttctaaagagatgctaaaagaacttgaggaaacccatgtaagtcagaaatatgatttcatccaagtccttactttaccaaaaaaagcaagattaataactgctacagcaaccatgttttgttttctgtcgtgctttttcaacagcttttcccaagagcgataagaatatttcagaaatgcaaatagtaataccttggaacaagcgtttatgtaattattatggtgatagtagtatcagttgtctccatcaagtgtttgaggtgtttcaggcactaaggaaatctttacttccattttgctttcccatttaatctttacgaccctttatggataagtattccttcactcattttcatggagaaaactgaggttaagggatatgtacaaagtcaccaagaagtagactttgtctgttagaaatagatccaggaagtttgtttctgtccagagccacagtgctgatcactcctttgtgaccatgtgaaggcctttcctgctcaaagctttattactgtaatatttcaccctttctgttttcaataggaattggtaaccaagaatatgtgctttggggttaggccatctaagcttccatgctgggtctgtttatttctgtgctgtgtgaccttggaccagtgacacatctctttgtctctgtttcttcatctgtacagtgagatggcttagtattttggcatgtgctggtacacgtgtgtggaatgagacaatctgtacaaagcccttcaaagaaggcctgggagagaaatgctttctataaatgttagctgttagctgtttgttgccttttgctgccatcttgatggcatccctaaagcttttttcttttgggtttatttacttccaggtctcacttcctttctaggtagatctggtgaactagcagcctgtggttctgatctgttccattttgtttgtgtgcttggcacactttctataattttaatgttcttctttctctgctcatttaaaaccatcctattagggcttggacatgtttgtttaattctctggacttgattgaaattcatgatcacaattaacttcttgtgcagcccccttgaggcagctcagggttctttctcatgatggtcttcagttttcttgggaccaatcatcattagcattggcaccaagggagaatgaaggagaagtgactcccgagtctccataagaggaatcaaaactgggcttattctttgaccctggggtaggtctgggtcttgggatatgatctaaggactaacacttcattctggggagttgcctgatactattcctaaggggacattgaccctgtgttggaatgtggggagatctcattgatactgataaggcttcttatttatttgttgatttagtatgggagaagatctccaatgggtcaggaaacagatttgtgacattgacaaggattctgaggacaattgccctatggtggctggaacgctttagtttgaggactttattgccagaaacaccatgtcatgcattgacttgttttctgcggttgtgataacctaccttgttttaacctgagtgactctctcctaggagagagagccagacagactccgttttagtgtcttcactcgcagccccctttatcccccttaagagaataaccagtgcaagctgactccaagcacatccaggaatgcacctgctgataagatactgaggcaggctataccagcagctcctgggaatgtgctcggtggaaggtacctaagagcccctgcatttatctcttagtgatagtttaagcccctgcacctggaactgtttattttttgtaactgcttctataaccaattaattttttaactttttgcctgttctgcttctgtaaaactgcttcagttaaactccccctcccctatttagaccatagtataaaagagaatgtagccccttcttcggggccaagagaattttgagcgctagctgtctctcggtcaccggctaataaaagactccatgatttgtctcaaagtgtggcgtttctctgtaactcacttagttacaacagggtccttgttcgttcttcacactattgtcaccctgcattcctgcgggagagccctgcttaaacagcagcacatgggactttttatcttgcattcttggtgtaagcaggtgaggacctacttttatctctctctctgcctgtcatgctaaaacaaccagaaggcctctggtttactttcatgagtccctagaagcctgtcatcagagagccagtctcactgcagtcatgattttggtttagctgctggtaaaagtgttgtgtgaaatgttggccatgggccatgcagaaacaggaagagagagcacaataaagagataaaaacacgaactctctgaaggcagttttagggactttgcctttgttgtgtgagttgatatgcacgacagtcccatgaattgggttttatgtaaggtcttcgtatctcacaaagacatgcagtgcctcatgcaagttcatcctagttggcggcacctttgtccaaggtcaccacattatcagtgcttctcatagctgctttgtgtcccctctctttgcagacagtaccacctcacacacactgtccttcgtgtggcctgtggggaggccactatgcctcacctgaccctaggttaagtcaaagtgaaatggaaaaaggttcacagtggaagagaagcctccacaggtgacagggcatggaagaagccctcaagccctcaagggctggctgcaggaggcacagaatgaattgggctctcccccaaaagagagagcttcaacagagagtggaagagagagtgtgtcagagacaagcaagtgaatataaatcagccatgtgatgctgaggcaaggagggcaagagagccagagaagggattcatatttgagtgagggtggccttggactcaacacttcatggtcatgcccaagccataaatgttcctgatctacacaattggagaagagcgacaagaaacacagagcattcagaggagagcctggaatttatggaagtaaagtctgtggggacactgcagcagctttggtcactcaccatgaggaattgtcatcttcaggggataaattagatgacatagaaccttatagctttgtctaggaggaacagggcttatagacaacttcaaggagacagaagaaattgaccaaagtccccttagcttctttagacatgaaacctactgattttcatggtaatatgtatgtgaagccaatttgtaaactataaggagacaggaagagatttggtcattggagagggatcacctgaggtctggagttcgagacccagctcggccaacatggtgaaaccccgtctctactaaaaatacaaaaattagttgggtgtggtggtgggctcttgtaattccagctactcaggaggctgaggcaggagaatcgcttgagcttggcggggcggaggttgcagcgagccgagattatgccactgcactccagcctgggcaacaagagtgaaactacatctcaaaaaaaaaaaaaaaattgaactccaggactgacacaggctagctctgggatgctagaaagtcacctctgccttttgtttcagcattcttaagagactaataatacctactttattaatggatggacttgttggaaatcaattgatagagaatgtataaatatactctgtaaacgatgaagcattttataaaaatataacttcacattgcacggatatccagtttttttaaataaaatatgcagaaagagtttattttggtgtttgatatattctaagatgagtggtaatagcaccttttagtacttcattttgatttctgttctagcatatttgctcttaaaactgaagagtaaggggaaaataaagatgaaaaatatgctttgatatttccaaatggagcttttcaaaatgtctccgatggacatggttaatatcagaatgttgaaattgaatgtagatgtatcaatgtgttaaataaaagctattgtccagcttaagaattatctctcactatagtaatatctaactagtagcattcataattgtaatcttttctacaatatttttgtaagaaggttgatcttaaaagttacacaagtagctttaaatatttgtgtctgccttgacaacagaaatcagtcaagaaggcggcgggtttatttttctttaggtgggtaagtatgataagatggatggtgcattaaaaaataaagagcaggacttctccaagctgatttacatattgattacttaaattactacttaatttagtgcctgctaataaactgtgccttggaaatgtttcccaagcatttattggctgcagtaattctacctacagtgtatgcagatcacagcctcattaaatattaatgtgctcatgaaatgttaatagaatgttaatgtgaaatacaagggaatgtgctcgctggaagctgggagccgaggaaaactacctgtcttctgtcttctctttatgttctgtcttctggctctgtttctttttttcagttcatttctcccatcattaggagcttcagatttgctctctgatctggctgtctcagatacaaaatatttagaggggagataaaattcactgattaatggaacttattctcccctcctgctttctggaatgggaatttctggttagaatcagaatggtttccctgaaaaggaaaagggtgattcaggctgagtgaaatgaaattgtctatgcttgggcagactgagtgcatatgttttggggaggccagcccactgcccagctcacctcagtgggctctgaccttcatctctatctggaatgttctttctcacataccttgacatagcaaggtctttctcatcgtttgattctcaatagtccgagaaccttccttgatcacctggttatctaaactcccctccccaagcattccctgttactctctgtcactcaacaagttattttttattttcatagcacttgcgataaactgtaactacctcttttgtttttgtgtccttcaattagaatgaatgcttaatgaggtcagggcccttgtctattttatggggctcagccatcttcctggtggataacaggtgctcaattaatactgttgactaagtgaataaaacacctgtccctgccactgaagagttcatattctgtggaggtgacaaaacagtgagtcactgcacagcatcattgtagatgctactgagagatgatcattcaaagtggtgtagctattaaggaagtcccagacaactcttactggggatgagttttggagaagaagctttagacatggataaagttccataacttgagagttttgttattttgttttgcttttgtttaatctatgtgtagagtaattcccttagttgagagtgttaggaacatctcaaattagcttaagaaaagaggataatttattagatggacaaaaggattttcagaggagggattgagcaacgaaaggggaaagacagggaagtagttgtgctataggaacagggggaccagtaggaataggtggaaccagtctcaaacacttctaggtctcttgctgtctcttgtctctgttttactttgcattttagttttattttcttttttctgagggccaacatccaggtaactcctaagtccacactccaggggcaccgtcagcatagttgagccagtattcattcattctttcattcattcattttttctttctttctttctttctttttttttctctttctctctttctttctcttttgaggtggattctcactctgtcactcaggctggagtgcagtggcactatcttggctcactgcaacctccgcttcccgggttcaagtgattctcctgcctcagcctgccccctagctgtgattaaaggcacctgccaccgcacccagataattttgtttttatttttagtagagagagtagtaattttagtagagatagtttttattttatttttagtattttattcgccatgttggccaggctggtctccaactcctgacctccaatgatccgcccgcctcggcctcccgcagtgctgggattacagacgtgaatcaccatacccggccccagtttttctcttagtatgaagtctcagggaaggactgtgattggtccatcatgtcacattttccaggcatgatttattcaactgatgccagagggtaagatcttgtaagaatatggacttccttggaaaatatcctattgaagtttgagactgaagtcacagaaggagttactattcccaagaaaagaggacagaaatgggaggacaagagagttgtttggtcactgaagtgaaaaagtctttattgtactattccaaaacactctccaggcttctctgtgtaaatgggaacgaacaagcaaaatatcctcttttacagggttgaagagggttgtcaaagatttgggggggataaatgagacttttcggtcctgtatacttggagtactattttgtcctggccccaagagtcttcgtttggggatctgaagtggatctatgtattcatctattggaatgaaggtgatattcttgatgttttccacaattgaatttcctttctaatctgttccctttcccattacagattgtgcttgagaacagtagtcgagaagacaagcatgaatgtccctttggccgcagtagtatagagctgaccaagatgctatgtgagatcttgaaagtgggcgagttgcgtaagtatacttatttcccacatgggtgtgaagctggcagagtcccagcttccagggttgtgcccctacctgtgtgaagaaatcccaagatgccgacagcttcttacggtcatcactgtggataggttgattattatttggctcaggtttacagcatacatacttttgcatgtctggtctggaagtaaatgtgattaaaacctatgggaatggagaaatttgcagatcattgtggctgagtttcaaatatcatgaaaatgagtacatattaaaacaggcttgcttctgttcaggaaaaaaaaatctatggatttcttttttaaaattccagtttataacctaccagtagatcattttcttttctttctaagcaatttttctctataaagaaaaattgaataccttaatgaaattctcttgctctcagtgtttctgttgtttggaatactttctctaagaaagaagaaattattaaagaaaatgggtagctgaaaatgaaaaatgtggtcagcaatatttttattgctctttttcttatatcacaaaatttatgagagtacatacagaaaaagaaaggatgataattttcttgccttttgttcattggcataatttagctttaatctaccaaggtggatatgatttaacctgtccctattatcattgtcgatgttgaaccttcttaaagtggtttacttccattccatccaacatctagaagccagcacacatataaatctttccgcacaggcttaataacatgagcaccagaaaagactgtttataccagaaaaatgttggggtgtttggtattactgtgaaaacataaatattcagttgcctgctcgagagcttaaaataatggcctgaaatgattaatgggaggaatctgatgattacattggaaagagagttatgttttatttacagtgtagaactgactacaggtactgctgaaataaactagaaaatttaatacttagtaaggaaaaatactaagaaattgagcctggttggccaagtggaaaactttatcatcttccagtgtgggctcatgggaggaagcagccaatgatgacatggaacatgagcatttttgcattagaacagtagcagtgtaacctgagagatctctgcattcacctactctggtttacagctcaccaaatgtgaagatttctgtttacatggatccttgacttgagttatccttcttactccctaattacactaactcgctgagatttcagtgtgcagtattgcttactgtttactcagcttaaggatgtaagtcctaaatcaaacaaatcctgctgaattcctctgtctgataactgtgactgtttcatgtttatctcaatttcatgggggaaattggtgaaagttgctggctggaaaacatgtctggaccatctgggagttaattttcagtaactggagtgagtagtggtgttctaccaggcaggtgtttctgtgtccaaggtactgctctgcactgcccttggttgtctcctcctttctgatgacaacctttggctgtttatgctcatcttgatggcagcagaaggcccactctccatgtgtaccttcactcatgttctatgacatgccgtgcccagctatctgctcttctcctttgcccaagggacatatgtctgtcctgctaaaagtaaacacataagagtgatctggtgtaggaggtagagattgctgggaatagaggggaactgagttcagctctgctacttagggccttgtgtccctgagtgaattactcacaaaccgcactgtgctcctacacctccaggttctctccagagcagaatgtctagaaatggattggaagtattttgggtggtgatttgagtagttgtgttcattttctggctgaaattgcagtgatctcagtgagaggagctctatgggaacagtcttattcaacctggggggaatagtttggaagagatggttgaattccagagcaggtgcaggcagggtaaacatgaccctgatgtgggctggcctctgggtcagtggatccccatccagtgggtggaggggacctcagctggcaagaatctgggcaggtagtcctcctcaggtgaatgttcattttgtgcttggggatggggtggggacagaataggggatagagcttgacctctggcaggtgtagagtagccctcctggcctttccaggacctggtggtcaatccaggaatcagggcagaactccatttgtgggctgaagtaacagagtggagatgaaggcaaacacctcgcaggtccctggagatgccacagatgctcttcatgcactgaagactgttccatctcccaccttctgatggagagaagactcccaacattctgccacaactcactcaggcctggtttctgcattgagactgggcttggacagctgaggcctggcattgtcaaagcagtctctcttcacctaagacgacaaacacatttattaatttgttcaatgaaaatctatccagtacttacaacatgccacagactatgagggacactgcaggtacaaaggaaccagatatggtccttgtccccgaaggagttcagaaaatttcctatacacttcagaaagtggaagaatgagctgggactgatactttttcctatgagttttgtcattatgttttttaacgcatgcccatcatctgtcctgaagaataatttccccaatgttgtgatagtcataagtttaagtttttagtttgacttattgcttgccatcatctgcaaagcccattctggaaatttgtcaaggcttacaaaacacattcatgtttctgaagcctacatgcccagatgagttgttttctgctcataaaatattaaggattgttactttctgattgaatgctagacaccaaatgataaaacaccctgtggtaagagcaaaattgctttttaatggattgctttttgcccattgccatattaaataagttactaatatgcaaagctaatctgaatacacccttatgttgaaagaaatgcctatttttcttctgaggaaaattagatttacacacaaatctatcttcacttggtttgtatgtgattatttttctccattcctaagttcatagttctgaacacttctcagatttgtgttaataattaaccttgaagaccatggtcactttagttctataagcaagtgctaagaccaaagaagtactcaattaaaaatctaactgctggggagaaaggatgtttacaaaagtagaaagatccaattttctagaaagcatttctcttttgattttaatttttggtctgttgaggaaacccacctctgaaataccaattatattttggtgtctaaagcaaacatattaatgttcaattaattactgataccaaatatttatgttcagttttctaaggttgctttaaaaaaaaaaacagcactattttcctgcttcccaattattgacattgcaagaagcaaatgttacctctaatagcgtggtccaaaataatgtctatttacattctcagagcactttgtcaaggttattcagttgaaggctgtaacactctcaggagttaatcaagagcaatggcatctatgtttattagtgaagggaagacttacttgcacctactgcgtatctgagtttactgagctcaaactggaatttaggaagccaaaaaaaaaaaaaaagaaaaagaaagacagtgtagacagaggcaagaaagtagagtgattgcatttgggcatctgaatgacccatcttggaatcacagctcagtcactggctgtatgccttgagaatgtttcttctctgttctgagccgctggttccttatttatgagataaatgaggaactgtgctgcacgcagttggttggagcctgaaatgagataatggatgttgtcctagttagaagatgagtaattttagggccggatgtgttggctcacgcctgtaatcccagcagtttgggaggccaaggtgggctgatcacaaggtcaggagatcaagaccgtcctgtctaacacggtgaaacccatctctacaaaaaatacaaaattagccgggcatggtggcgggtgcctgtagtcccagctacttaggaggctgaggcaggagaatggtgtgaacctgggaggcggagcttgcagtgagctgagattgcaccactgccctccagcctgggcgacagagcgagactctgtctccaaaaaaaaaaaaaaaaaaaaaaaaaaaaagaatatgggtaattttttttgcaagtgatagaacctcactttccatgagcaaactgaaagttaggtgaggagggtgctgtggcataaatgacagctggatctagggcctggaacaatgtcccttgtttctttatcttctatatattggttaaaagttttctttttaacctgctttattcatgaggctcttttgtgagcaagacatattttctcttagtttcagtttcaaaaattacaaagaagaatacttagggacctggatgtggtcacatatccccatagcctgaattggataattggcagccccagtcagaagaacaagattgaagattgagggatgatatggtttggctgtgtccccacccaaatctcatcttgaattgtagctcccataattcccacgtgttataggagggacccagtgggagataatcaaatcgtaagtgtggtttcccctgtactgttctcatggtactgaaaaagtctcacgagatctgatggttttataaggggaaaccccttttgctccgttctcattctgtcttgcctgccgccatgtaagacttgccttttgccttccaccatgattgtgaggcctccccagccacgtggtgctgtgagtccattaaacctctttttctttataaattacccagtcttgggtatgtctttagcagcagcgtgaaaacagactatttcaagaaaggagcaagtcttcaaaagaagagttatattccctgcacactgaccctgtgtgtgcagggtcagtgagagtggagggggcagggagtggtgcccttacagaaaacaggaggcatagcacagatgaatacacatgtgcttactgtcaatgtgaagtcattaagaagatgcccagctcctagctggggaaaaagaaatggtagctattttttattgttgttattaaagcacttgtcctgaaagaaataataaattattggctgggcatggtagctcacgcctgtaatcccagcactttcagcggccgaggcgggtggatcacctgaggtcaggagttcgagaccagcctggccaacatggtgaaaccccatctctactaaaaatacaaaattagccgggcatggtggtgcatgcctgtattcccagttactcaggaagctgagacaggagaatcactggaacccaggaggcagaggttgcagtgagtcgatattgccccattgtactccagcctgggtgacaagaatgaaactctgcctcaaaaaactaaaaacataagtaaataaatacattgttgatgagtgccaggaatacttgatttctggtacaaatggatcaattactctcttttgaataggtagaaccttacccaattatattccgatgtcaggtacagctaagatattttattttcctcactcattcatttattcacttaataactgtagggcacctctatgagtcaggatcagggtcactgtggacatggatttagaacccattctccatcctcaggcagctcacactaactggagggtccttcacataaataaatgattataaaacatttttccatttgtaacattacatttgagtcacattcatatctctgggaggcaatacttcattccttctgtttgtgaagaactgggcagggctggggaaaggagagtcttgcaaggtgtgatagagaagaagagatacctgcacgtggggttcacaaagacaaagagatatcaggcagtcatggctgtgtggatggtgggaggcggctgttgaaaattccaggcagtgagaaatggtaggctagaagacctggaggttcaagggattctagttccatgtagttaatgcagagggtttgagggaggaagcaaagggcagaggtgctagcagaagcagttgtcagatcacaagtatttgccatgcagagagttttgactttaccttacaggcagtggaaaccaatagaaggattttaataatgaaaagaaatgtcccagttatgggaataacacgctagaattagattatattttctgggtgtgacagacttgtgagcatgatggtgtacaggctcaccccagtcctggcctaataatgcagcagttaggacaatttcagctacaagtagtagaaatctcaactcaaaatgtcctgccaaggacatgtattgcataagtccagagttgtgtagatcctagagctggttagcatacctgtccggtgatgtcattagggacccaagttattttcatctttctgttctgtgtctggtagcaagatgatggctaccttcacatagtcagaggaacaagaggccatctcttccggtggatctcttttaggtgtgtagaagtgtttttggaagactttcagcacactttctctcgtgttttcttggctgacactttggcgtgtgactgtgcctagcccagccatggacagggaatgggactgtccagaggttggattagccattacccattacccattagtataacatacctctcctgagtatgttatatgaccacaggatgttagatatctaaagaaaactggagttatgttaagatgggataaataattacttgaaacccttaattctgtctctttacagtcttttctgcagtgtccttactgatgcagaaaaccataacaaattgaagccagattacagtcctctgtcattttgtcttcattgagaattggggaaatgcactagtatctttttaaatgcagcaatatcaaagattgcagaaaaatggaaattgaggtttgattataatgcatttcttctttcatcactaagatgctagggctccactgcattactgtccttttagcaaatggatatttccacttcttcaattatgcttttgtgtgggggttattctcaggtgtattttgaagagcagaatggacatacatttgtgattgaagccttgaaacagttttgccaaattcacctgtttgaccgtttataattagattacaatttaatactactgctctgggtttttttttaaaaaaaagcaagaaagaaacctacattacacattatgaaaatgttcaccatttccttactttgtctttccatggcaatatttattataatacaccagtggtgccgagtggagcaccttgtataattcatcacccagacacctctgctttagcaagtaaaaataacacagatgagcaacctgaaggactgtttggagtgcagcagcaattagaatagacacttaactctgggacattggtgtttttgtaccttgagaagtaccatccgtcactttcattcttggggaatacattctggctaaagaaaactcaagaaaattagcttttaacagttaaatctcttaaggacctttttttttctccaaatacgagcttgtactcttgcttatgcaaagtggaatgctctcagatcttgattctgccctgaattttcacgttctactcttacattctatttcaaccttaagtttaaagtaaaacaaaaacaaatgttctaaagcctaactttgacattaggaagttgcagacacttttggtctaaattaaaatcatcataggagagagcataaaagtcatttgaaggtgattgttttaaataattaaaaaactaatagtgggatttataatggtattctccaaggcaggagagaacttcatgtaaaattcttgcattcaggatcagaagcccttgtgataggcatagttgatacgaggacttttgccatgatggttaaccttcatcttgccccttactgtccccatctgtaacatagggatatcatcatcagtcatcatcagtcatgatcgtcatcattctcatctgagaatcaggtgaggaaatgttagttaaagtgctttgttaactgtaaaatgcactatttgtggaagaaataaattaacttgaatatgcacaagcttagagataccaagatgcatcttgcagcaaagccaactgtttctgtgcattttgtggatatcctaagaatctgaagttctgtggtgctttgtttgtgtttcagaaagcagtacttggagatacttctgaaattgcaggaaaatgttcatccccataggaagtggttacagagagcaactaaacttggcagtttaaaaggagactatactaagcacatctcaattataaatggatgaaaataatatttatcatagactttttaaggacttattcctttttacattatttctgaaaagatatagctggccccaatcagcatccattcctgttgtctcttagaggtcatggctaagaggtgagcctggtagatttgcccaagctggtaatgagagatacagacctgttgaaaggcacaggctcccattgtcttcttaacgccttatagaaacacttctggttcatctcaagcatcgtttgggtgactgttctgattcctcgcctcatcttcactgtgggagggcattacagctccctcagaactcctgtagcactttatctgtgtctctttgttatgctttctactgtttattaatacatacccttttctttttctttcattcctggcctcacttcccctaaaaattggggtggtttataggaaaccttgaagataataaaaaataatgataaatggtaaaaaccacggcaaataaaaagtaaaatgaaaaaatggatgatgaaaagtacatgttacaaaagcctttgcatttgctagcagtggacactgaatttggctcaaatattcatttgtctcagggaagcaagaggagcttgaaaatatgaaacaggtcagtgctccatctcacatgaataagctcaatgtgaaaacccagatgctaatttcaatttaaacccaataatgttaaaatagtgtttcataatatttaatatattcattaaagatgatggactaggacacactcttatcattaaaaaaaaaaatctgccagaaagtgacaagctagcatcattcttaaaataaagataccaaaacagctttcccatcaaaaactgagactaaactgggatgctatatgatgctgattattattcaccattactatttctccttgatctggaaaacttacaaacacattagaggtagagttcatcgatagaaacaaatattttaaactgtaggtaataagactttctatccctgaagaagcaaaggataagctaatgtggtttagaagagtagctagatagtgaataaacgaaacttagtagatgttccatatgtcagcaataattataaaatggaaaaaaaagattataacagtagcaatgaaaatgtaaactactttggaataatcccaatggaaaacatcttggaaacttaggtgaagaaaactgtaagactttgccaaaatatacaatagacatttcaaataaatagagaagcaaaatgttttcttcctggttagaaaacaatatgcaaaggttgcaagttcctctacattagtggacaggctcatatcacattccaaagtatcactgggaattaggatggaaacttcacgggatgactctagacttcatttgaaagaataagggcatgagaattggtaagggagaattgatatttttttttggcaagaaagttcaaagatttcttttttttttttttttttttttggagacaggatctcactctgttgcccaggctggagtgcagtggtgtgatctcggctcactgcaacctccgcctcctgggttcaagcgattctcttgcctcagcctcccgagtacctgggattacaggaatgcaccaccacactgggctaatttttgtatttttagtagagatgggttttcaccatgctggccaggctggtctcgaactcctgacctcaagtgacccgcctgactcagcctcccaaagtgctgggattacaggtgtgagccactgcgcctggccaaaataactcattcacccaggttcatctatagttatgccaacattttgccacatatgttttatcattcaccctctttttctctccttctcttcacacacacacacacacacacacacacacacacacacagtcatgtattgttacaaaaatgtttcttttagccaaaaaaattgttttaaaaaatataacttgaagaaaaattcaaaatagaagtatttaaaatcagttctaactccggcctcttgtgtctgaaagagcaaaaggtgctggagccctgcctggcaggaggcttgcccgggagggctgtggaggaggaagggactctgctgccacagagtgaggctccatctggaagtggtgtccagagcctggctgagcacctctgcttgcccttagagatctgagagagacgcactgccgcctaattcttcccaaagcaggtcaacggtgttgctgtcagggaccttccttggatgaaacttacatccaccttcccttctggtcttttccaatgctagtggatgtcgttttcctaaaatcccagtggttatatacatgaggaagtttaaattcaggatacaagcatcttatagcaggagaaacatcataaaacaaaatcacaaatataacaggattccaatcaatgacggaggccatttgcaggatgacatcatcacgtctcatcagtaaaatgagtattaaagtgactagtctcattccaaaggtgtaaagtgcaaaaaccatctttccctagttccagagatgccagtctcttctaaatctcaagcttggacccacgggttattttttttttccaaagcagtaatcactgttctcagcatttcttgtaggatcgtgatgtaccaggccatacccttcaaagtcctcataagttgtaaaagtagaatattagtatggaaggcagcatgaaattggagggaaagtataagcagaatgctagaagattctaatagatagtaaaataaactaacctcactaaaataaagtaaaacaacagaaatcaggatgtcaaactgcactgaaaagatgatgaaatgctaactgtaaagttttcaaaaccaaaatatacatgagtgaaacaaacaaatggaaaaaaaataaaaaaacaaaacagaagcatacccacagctaaagtctttaaaacactttttgcagacactgtggcttcctacagtgtcagtttttccctcagggagtctgcagtagttaggggagcagcttgaggacagaaagctctagaatgcttttatttctcatccttaacctggagcctttggttgtaaagatttacctggtggttggaatagattagaaggtggatgccaatcaggtctcccagccttgggcacttgaacttcaatcaaaaaccacttgctgattttggctgggcaggatggcttacacctgtaatccaaccactttgggaggctgaggcgggcagattacatgaggtcaggagtttgaaaccagcctggccaacatagtgaaaccctcgtctctactaaaatacaaaaattagccaggtatgctggtgggagcctgtaatcccaactacatgggaggctgaggctggagaatcgcctgaactcgggaggcagaggttggagtgagccaacatcatgccactgcatcccagcctgggcaacagagtgagattccatctcaaaaaaaaaaaaaaaggaatttgcttttttaaaaagagggagaccactgccatttattggatgctttctatgtaacagagaattcccagagtcaataataagcacacgttacctctgttaacccctgcaacatcttcatttacaaataaggaacctgagatgaagggagaggttaagtagactgaggtgatgcaggtattagatggagtgaattattgtgagattctcctgtgctgtttgcccttaactatggtgcaatgctatcacccactgctttcactttctttgtaaatatcctgtcttccttacagactgtaagccctttgaggactagactcttagtgaattcagcttccatcttaacttctagcacagtgttttacatgtagtctgcatttaataagcgtttgttgcatgaatagagtagctttctgtttgcttcagggtcagttccaaaaatattcttcagacattgctaaatttttaataaactttgcattttaccctgaaacctctcaaacaacattcttgttttcttctaaaataagtgagaatgagttatactaaagggctcctcttcatccctctccctcccgctcctcctcagggtaatttggttgagaaggcccactgagtccaaatttgaattagaaaatatcaacactacagtatgttcccccaagaggaaaaaaatgatctattttcaatcttgtgtttcagaacacacagctgtgtgacttcctaatttattatatccccaactgcctccagacagctctcagcttgctgctttttttctacccactcccgctctatgggaaatgggttcgactttaaccagcacagagttcaatctctgttctaggcaggactccagtgaggactccgagaggccagtaaacagcacttttccaaagatgcctcctcctcagcaggtgctcctatccaccaggacttgatgggagccaggtcccttcagatggtggctgtaggaagccaggctatcaggggcagctccagctggcaggtcttctggctgcctgtctctctggagtgagctcgctttcttcctcccagagagggctttctggcctgtctgcagggagcaggacacagttttagatcccagcaaacaaacccaatgtggcttcccttaatttggcttcccaagggttttggccgcaagaacagattgcagctgtggcctgagcatctttagaagtgtgaatcacattttttttccctgaagaagctattttgagctttataattacatatttccatgtttttttttatagagtgagtaaggagaatgacttgcatttttttaaatggaaatctgctggtttctttgctcttctgtcttgtataacttagtccagtgattcctgacttggctgtgtatcagattcactttggggagcttctgtgaaatgcaaattcctgcaggggaatccagaaatcagcaagcttaatagactctgcagttgattcctaggcagcccgatggccccctcccaagtttggacctacccttccctgggaattcagatcatggctaagtggatattactctggggtggcaagagccactcacagtgcctaagagagattaagcattagaagacctggattctagttctggctccactaccaagcagctctagacaagtgtctcctgtatggtcctcatgttcctaggcggggaaatgctgggattgtccaggtggcccccagctctaaagctactgtggtactccttgttatgtaaccaatatgctgactgtaaccactacattagttatacttgaactttgttgtcacctgttcttgagtgacatatgtataacctgaactgactattccattttgtacaagagaattatggaaatgcccacaggccttgttataaagggctcctggggaataggcaacctcaaagcacggaccaaaggacttacctctcccatgcaggtgtgacgactctcagcttttggacagagaattaagcaaaatgggcttttctgtttgtttgtttgtttgtttgtttgtttgagacagggtcacccgggctggagtgcagtaacgcagtcacagctcactgcaacctctgcttcccaggttcaagtgatcctcccatatcagcctcccaagtagctggaaccacagacacatgccactacacacaatttttacacagacacactactctacactataccaatttttttttggtagagacagggtttcaccatgttacccaggctggtctggaactcctggactcgagcaagctgactgctctggcctcccaaagtgctgggattacagacatgagccaccgtacctggctgtgaaatatgcttttctcattctgcatgtttttctcctttgaaatatcaaccatcagaatcttttgagaggagttaaacattaattttgccagaacagatataggaagtggtaaaaaaaaaaatccctctgttttcatcattttctgcccaactgatttctccccctctattttcccatgcaagcatcctctgggctaggtttggtggccactccattataatgccagtgcagcttttggggactgtggcaggtgcctggcccatctttacgtggaaacagcggtatctaaataaacctgacacatggaggaagaaatgaacctaaatgcaaatgctattaacatttctgcaagtcatacctatccccaagaagcatagctctcatgtttcttagtcttttattggcaatttaattgtttgagaaattgctttttaccagagtccgtaagaatcctaccaaaatgcactgacttattttcccatcgacttgcccgggtgagaactcagcttgctgcttttctgtgtcattaccatcatcagaagaaacttcaaatgtaaggcctcgcagggttcattgttttcattattttttttgtttttgttttagatcaagagtttaccttaatgcacatcgtattagtccattttcatgctgctgatacctgtgactgggtaatttataaagaaaaagaggtttaatggactcacagttccacctgtctggggagacctcataatcatggcccaaggcaaaaggcacgtcttacctggcagcaggccaagagggaatgagagccaagtgaaaggggtttccccttgtctcgtgagacttgcttattcactaccatgaaaacagtaaggaggaaattgctcccgtgtttcagttatctcccactgggtccctcccacaacacatgggaatgatggaagctaaaattcaagatgagatttgggtggggacacagccaaaccatatcacatatactgtaccaaattctcctaggtgattttattataaaaatgaactaatacgcatattactttatatcctgattcttttcacttaatgtgttagagacatctttcagaaaatatgttcattcaaaagttcattcaaacttttaataattgcatagtattccattttatagatagggtcattttgtggatatggatataaatagtatttcattttatgaaagtatgtctcccattgacaggtatttatattgtttgcaattttttttcttataaagagcaccgggatgaacatttgctcagtaaatacacttaacatgttagcactggggctatagcagtgaaataatctgactactatccattcccttaaagagcatatattttagttggagaaaggtaataaacagataaagaagtatgtcatatggtgaaaaatggagaaaaatgcagcagaaaagggaggactcatgagattgcctcattgagatggtgacattgatcacaattatgaatgaagtgaggaagtgggccaagatagtgtctggaaaagagttttccagaaagagggaacagccaatgtgaagaccctgaggcaggagtgtttgccatgagaaagtaagaacacagaggccagtggggctgaagcagagagaaccagggaaagatagtataagagtaggctagagggtggccgggcacagtgactcacacctgcaattccagcactttgagaaggtgaggaaggtggatcacgaggtcagaagttcaagaccagcctggccaacatagtgaaatcctgtctctactaaaaatacaaaaaaaaaaaaaaaaaaaaaaaattaggcgtggtggcaggcgcctgtagtcccagctacttgggatgctgaggtgggagaatcgcttgaattcgggaggcagagatggcagtgaactgagatcacgccgctgcactccagcctgggtgacacagcaagactctgtctcaaaaaaaaaaaaaaaaaaagtgggatggtgggtgagagattcttcaggtgcttgtaggcccttgtaaccaatttggcttttactctacgtagaaagagaagccgttgggcagattgagcatacatgtgacattatgtgatttataatttcaaagaattgtgtggctcatgtattgagattagactgtgggagagcaagttaatataccccactacaataagcaagttgagagatgatggtgtcctgaaccagagtgttagcagtggcagtactgtaaaaaggttggattcaggatttatgttaaaggtagagccaacaggattttcctggatgattggatgtggagtggggaataagaggagtgaaggatggatgactagaagcagggagtcatcactgaaattgatggaggggcatagaagattaggagttctgttttgtttgtgttaattttgagatgctgtttagacatctaattggagatgttgatttcatagttggatatatgtgtctggagtttaggggatgattttgaattggagatgtaactttgagcatcaacagtatatagataatagttaaagctatgagactgaatgaaagcattgaagaggccctagaattgatgcctagagcaccccaagatttagaggctggggagaagaggaggctggggaaggagttgagtggggctcccaggggcataggaagaaactcaagagaaagttcaattcaaggtgaaggagagattgcagtgtcatatgctgcaggtgatggggttaaatgaggactgagaactgaccattgatttttagtaaggtggaggtcagggtgacctgaacaagagtgatttcaccggagtgggggaggagagagcccaactagatgggttaagagcaagtaggggcagaggcaatgggactattagtagagatgcatgctgctcagtgtgggccactgatggctgtgaggagatagtgaagaggaggcttttagaaacatttacaccatttgacatcaccacagccttcaagcccatgatcctttttctagtggttaattttcattatactttttcaagagtgtctgtttctaatcaacaagttagacattgaaaacaaactggttttcactgcagatagtttgagaggtactgatacagatgaccatttaaaggggctttgcttcacagtgatacagaaaataaggtagaagctgaaagggaagttatagtcaagtgagatttttttattggtgggagaaataacagcatgtttatatgctcctggggaagatttggtagagagggaaaatttgatgaagacggagacctatatctctgtctttacacacatcttaataatttccttagccaagtgtctaccaacagattctgaattagatagtgcacacttttagtatttttaaattcacaggtaatatatgctcaatgctaaaaaatttaaacatgtagagaagcagaaccaataattatctattattctgccaccaagagggattcatatatacctttgtacgctttttgggcattaatacaggattaaagcgtgtatttttaaatattctattatttaatatattgtaactatccacgataacaaaaatataattgtatcattatttaatgtctgcttagtgtttcattgtgtgtatctactataattaatttgactagactcattgcaggatatttaaggatatttccttttttcatgagaaatagcactgtgatgaacatccttgtaattccatgtgattatttcctgtaaattaattcttagaagaagttctatgtcaaatggtttgaaatcttaaagctttttatttatttaccaaattaacccctagaaaggctgaagcatttgcacttcacagagcagtcatgtagattcagataaaaggcagttttcaaactaattaaaaaattggaggtagaggaagaaacctaactgagatggtgggatttggggtgatcatatatagggagatattaagatagatggatcattaatagatatagacatgagagagacttacagatgtaggcatggtagatttatgcatatttatgatagagatttataggtagagatttatagatagggatttatggatgctctttcttcatctacactatagccatattattactttcatgtgccctaggtacttttgcctttgtgggtcccttccttcataaaacagtattaaaacttaacattttatgactgcattattataaagatgaatataatcgtgcccggattcattattatatattcattattctatttacgttttccttctgatttaaattgaacttaaaatattttcaggggcctctgaaagcatcatgggcctgcagcactgtggctgctgggcctcctgactaggtcatcctgattctgcttctctgtactctttatatttttgataatgaatagacattacttatgacataaaaaataaaagaggaaaatatcaaactaaatgtataaatattcatgcttcctatgtaggtttctttccctttactcacgaaggcaggaggtacattcccctttgctcgtatgctctggatcatttctccctaacagtgggttagactggaaggcctggctcctgcaatcaagaaaaagtgaaaatgcactagctcctctctccacctgtggctcctcctgacccctggggtcaccatttaccccgttgttggcgcctgaaacttgctgccatcttcagtcactgcctcacatccacagtcagccagcggccacgtcctgttaattcagtacccatatttcttaaatctcctgatttttctgcatatgtactcccatcactctaattcagatcaccattgtatggcctgcatacttgcctcctccaatccgcccctgcttcatcctgcaactgtgtattttttcctacagcattgtcagacctgtctaaaactcccattgggccatgattcctcttaggctgaagcccaaacttctttgcaacaccaccacgccccagaaatctcagtgtgacgtgcttcctcttcaccctgggccatggcccacactgggtcctcattccagaatgtcctttccatccctgtgcttgtacaattcagacccacttctcagcctctctccctgagggcacagctccctgagacctgggcttaatcctgcccttcgccctgttgaggcacatctcacactgtattgaattgcatatttgcatatctttctttgcagcttttctcccgccagctccatctgccccataattagtatcagttccatcccaattctagtataagattgtcctttaatccaacatgtatgtaaagcttggagaggctgcacgggttggagcggggcagctagtggctaccatactgaactggacagaagacagttttgttagaaagttaaattctttgttgtcgggggcataattgggacagtaaataatccgtaaaatctcccagtcagcacaggcagttacatgagatagtagaaggcaatgggaaggctcttagccgcagtgccagatacacagcctgtgctcagcagatattgcctgtcactatcatcctgatggaggcagcattgggaacctggctggccagaagtgggggctgtctgtggtggagcgttgtgcaccctcaggatgataccatcactggcagtcggaaggaggtgagaaaccagcagatgggtcctgctgctgctagatactcaccaatggaactcaagatctttgttctctttatgtgggatggagccccagattctttgctgcccctgaccttgaggaaaagttagaatcatagccaataacacttactgaactattttggctaactagaggtttgggttttcaggtgataaggaaacaaatttaaacagccaaacaagatcaatctaaccttctggttgttgactgtgttgtttttcccttaaaacactggtcatcgtggctggtgagatgggcaaaagagaccgtttcctgaacctttattcttacttcatcggatcccatgccacatggttgtctgtatttatgcttaagataatactataatttctgtcatttttgagtattcctctttagtcatgaccttgagtcctttgatttctagctttgagtagttcatgagatgtggttgtggaggctttttatctcaagaaataggaaaaaaaataactggaaggaggcagtcaaatggattactctctggaagtaattgagaatagtgactcatcagggggtaacgaaatgactttagtgaattttggatagtggtttcaaaatggaataaaataatttttagagtgcctcacaagtagcaaagggaagtgtttcattaaatcagttttacattcatctgcctgtgtactgggatgtagtacaaatgtgtttcatactgtaggtcacagctgaaagagtttaaaaagttcccctcaacccccaccccattataaggcaattcaccttgaaattacttactcaacagagcattgtctgttttcacattaatgaatgcattacacatttttttattcaaattcattattttgtgtcagggtttatcttaagggatgagttgcctggcacacagtgatacaaggaagggtgatcatcatctgtcaccatgcaattcctgctcacagcctttctgttggtgccacttctggctctttgtgatgtccccatatccctaggcttctccccctcctagaagggcttcttgatagattagaaaataagaatgagtgacatttcctatgtgcatataagaaggagccacaagacatgtcttttaaataaaaggacagtgtccatccttttagctgccgaatagaaccttggtctcatcctcctggagctaggccttaaaacagcttctgtgtttctcatttgtctcagtgttttgccagggttttatcggaaagataatgttccgtttaaaatatttcctaatgaggccgggcgtggtggctcacgcctgtaaccctagcactttgggaggctgaggcgggtggatcacgaggtcaggagatcgagaccatcctggctaacatggtgaaaccccgtctctactaaaaatacaaaaaaaaaaaaaaattagccgggtgtggtggcgggcgcctgtagtcccagctacttgggaggctgaggcaggagaatggcatgaacccgggaggcagagcttgcagtgagcagagatcgtgccactgcactccagcctgggcaacagagcgagactccatctcaaaaaaaaaaaaaaaaattccaaatgaaagccatcaactactatctacgtaaaagccatgtatctaaaacccaggcagaaatggctggctaagtgttacacaccttttattgctcgtggacatcttcacacacaatccagggaatgggaataagtgcggcatgagaaagcaatttcagggttccgactaataagaaaatgattgagtagtcattcacccccattcaagccaaggtctgtggaaaaacccttactgctttgggccttgaaagtctctgtaatctggcttctgcctgttttttgccttaaatttctaatgcaattcaaaagaaaactaacaaccaaaatcagcttgcattttgcccatttgcaactccctaaacaagctaaacctcctcacttctgactctgctctttggtacgttctctccctagctgcttctggtctaatattaaccccacattcatagccgggttattgccaccaccacacaaaactctgggggccctggatccaggctaagtataattcagtgcacttctgtggggcacctactgtgttgcaagcatgatactcagataggacagcaaagacaaaaggattcttgtcttcatcccctcgccctcctgggaacccaggccacagagttattaggcaaatacctactggacatcagctatgtctcagatctcattccaggcactgggagtttattgatctggtgaagataaccgaaaagtgaatcatgagttatttcttatttgtttatattctaacaccattttaagctactgagcaaagagtagttctctagaagcaaaacagaatattaataaagctgttttacccacagtaatcctttgatttctaccactgtttagacaagtgacatagcatagattttatttccaaatattttctattatatttaaattatactatatatttataccctatatatgaatttatgcatatataaaatatataaatgtatttacatatatacataaatatatagtattatattgatatataaatatatttatatacttaaatatatatttttgcatactatatatttatactatatatttaattatactgtattataacttttgagaagatcagtattttcattttttaaaatagtcacataattgttcttgaattcttttctgccatttccctacttctcctaaaatatcacacaaaatctggactgtataagatacatagaaatatattttaatattataaaatcaatacattaaaaattttagtggtcaggtgcagagtggctctttcctgtaatcccaatactttgggaggccaaagccggagggtctcttgaggccagaagacaagtctgggcaacacagcaaaaccctgtctctacaaaaaataaaataaaattacctggacatggtggtatgtgtctgtagtcctagcacagacccaggagttcaagcatcacagtgaactatgatatgttcgtgaaggatacagtgccaccgtactctagcctggacgacagagcaagaccctgtctctaaggaaaaaaaaaaacatgcacacacacacacacacacacatacaaaaacaacaataaaaaccagatgcttgtccgctgttgaaaatgtagaagttttagaaaatgggaatgatatttaaaggagaaaattaaagccccttactattctgccaccatgagataacagtgtaggcatagtgatgtgttcccttttagcctctactgtatctatatttgtatcctcacattatctgcataaatacatgtgtttgcatatacatgtatatataaaaaatgtgggatcatactgcctctgaagttcagaatcctggtttcttttttccttccctcaaaattatcatcagtaacttctttctatatcttaaaatatccttcaagggcatattctttaatgactagatagcattatgttcaaaagatgtctatttctatatattgagattgtttccaaatttttactgtaaaaaacacctctggctatatctaccaccagaattaacgcaaaggattcatttttaatgttttacttagaagaaattcctagaagtgaaattgctagtcagtgggcatgtatgtatagttacttagatagatgttgcctaactgccctctgaaaagtttcctttgatgtttctggccccttagcagggatatgataaaattatagcaacaataaaagaaaaccaagaaacctctttgtcaacttgagagttcaaggtattgtctcattcttggctcttttatgagaaaggttaaacattttttgacatatgtattgtccatgtgtattttgtgtgtccaaatggttggttctgttgtaattgcatgtgagtggtactcgccttatgttttatgaagaagagaaaccagtggcaccccctcactgcaggctcctcctagttaatggtgacgcatgttattgatgtaggaactgaaggttgactctttaagtaataaggggaatggatgattcctcatttgggatgtgtatggagtggtggttttacttacgtagtttactgctttaaagatattaaaatagaggagctatattgatttgcattccgagttcataagaagttaagtattgagggacctatattgtgttttcatgctgctgataaagacatccccaagactgggcaatttacaaaagaaagaggtttaatgaacttacagttccacatggcagtcacatcgtacgtggatggcagcaggcaaagagagcttgtgcagggaactcccatttttaaaaccagccgatcttatgagacttatttactataatgagaacagcacaggaaagacccacccccatgattcaattacttcccaccaggctcctcctacaacacgcgggaattgtgggggttacaaatcaagatgagattttggtgagaatacagccaaaccatatcagggcccaagcccaattttcagaggagacccttttttggtgcttcatgtactttaacactctttgttttttgaattgccgaaagcctatagagtagttggattagtagctaatttttgtaagttttagattatttttgagttaatacttttagatttaaaataaagaatgctcctcctcattctcaagaagaacttgtttactcttgagcttcagctcccagctgaagagctctcctgaacctttttaattgagtatactaatattatatatattgtgtgcgtgtgtgcacgtgtgcgtgtgtgtgtatttaaaagctagataatattccaaagaaatgtctgacctaagataatgtttgaaatgggagcattaacaaagttagttttgcctgaagggaatttttcttattttaatctactagcaaaattaaagagcctgggggatgatatttttagctattgttagtaaataaaatatggtagcatgagttttgtttttttcaagttacaccaaataaaggaagatgttatcaaattgtattgtcttccttacttgttgaatgtacttaaattttttagcttaattaaacctggggagtggggaaggtagagactatgtgtacaccaccattgagctctctctggagttgaattctccttaggagatttgaatcaaaacacccaaaattgattctgttcttgaactatagtcccactcaagactctgaaacacagttatgaaatctcttgctagtttctttttgagagcgtgaggccagctttgggaaaaatacattttttttcctaagattgtgggcatggtgaagaatatgaggtttgaatgtgtaggggtggaggtggaagggatgaataatttattctctttcttttctacctactattcatgtaaatggaaccctacaatgtgtagctttttgtgtctctcttcttccactcaatatactggtttaatgccagttgagattcagttttctttgtttcttttgttctctttttaagtcagagtcatcgagggataatttatacagtaaaacttacccttttttgatgtacagttctttagttttggtaattgtataccatcatgtaaccaccatcaaaatcaggatacaggctattttcagttctcctaaaagttttctctggacaatgagttttgcctctttgactagtagttctcagttggtggaggataatcggtgggggaatgtggtgaaagtaaatctaggctcattgacataaatctccactaatctcattgagttaactgttaggatgatgcactgattccttgatgagagtatgcctcccctttgtgaattgtatataaaggaatgtcccagaagagaaaatacatcacagatgctccccttaactggattaccctacttagtttattaatccaggtgtggttagttccacagggtgagccaggagccctgcctgacaacagagtaaagctggtacccatcattctgaaatccatcatgtcatctttcactagaagccaggaatggccagaccaaacaagaaagccttgctcaagacacgtgggaccacagatgagaacaggaggctggaaacccgtgtatttgctgatcttggtttccaatttacagctgttatcccagactgatacttaaatatgtgttttaagtataacacacacacacacagttcacaaattccaacggaaatcaagaaagggtgcaatattttcagtgaactaaattgataaatttttatggtcttagccctctactatagatgaaaaagaaagaaagaatacaagaggattgcatcttcatatgaatttttcccagcctctcatattctcatatcctcttctcgtctgtttaatcacactccccaagatgtggaaggcttgtgaagagccacagaatgaagagacttaagcagcatgggctcctctgccatccaatggtgccaggaacgtagggtgatgaggatgtaagaggatgcagtggcagttttccctcttttgcctcctttgattgctatctccttaccccctagagaaatatcttctgtgtctgattggatgaggtgaagaaaagaaaattgcatttatttgaagcttaaagtttagccagatgggagccagcttaagtttcatttgaatataattttgttttctcccctcgtcaccctcctatgttgagttgcctctgacaactgataaaattctcattttcaagcaaatctaggatttagatataaatatgcagagagagcacagaaattagctcatgttctcaaagttaaaaagggtgaaattggagtaacttcacataagaaaaatttcaacttatgctggtaagatggatcgaaatagaatataacaatattttagttataaaattcttccaattcttaatttttaagtcagtagaacattctagcaaagtttattactaattctgagacccattttctcatcaacttttagtatgaaatcggagatcggttccatttgaaacatttcttccaaagattgagctaaaagtgcttgttatgaaataaattataagtttggggcatgttatgagatgtgagactttagaaattttagcacctattagtcattcacttttctttgctacagtgaggcacaatttgagaatttctcttctagggaatttcttaatttcatgtttgcagctgctagaacttttctgattttagtaactctggttctggatttttcccctgcctcatacatgaagtggttgggaagtgatggagtggatttgttttgactttatcagatcaagaattaatttactaatttgagtggttttcatcaagaaacatattcttttccttctaaatagatcgcttagatctatttagagaggtcttaggaccagacttgtaaggtgtagataaagcacatttttttaatgtattccttttgtctctagttagacttactggggaagtggggaggggcttactggccaaccctgggagtaaatggtaaccatttattggagctcttagtggtttagaatgggattggagctgttcccaccactgggaggctcccagggagcagcagctgcaatcttagaggaatgaaggagtgtcctactgtcaggatagaaccctgactcttacacggagagatgaggcatttggagacatgtgaccatcatttcaaaatgaggtcattaacacttttatatttcacatgtagaattgtcacttaaattcaaactgctgttttataattattttgtattagccacctttatatttaagatttatagccttcaataatttgggggaccatctcatgacctaggagtcgggctcattactatgtaatgtttgcttgtggggcccagacctcctaaaggggatttctgtaggaatccctcaagctgtctgtgctttagtgagcaccactatctccccttttgtaaaccagcatgaacactccttagtttcattatatcattatattgggtaatgaaccaactgtagttctctctactctctcagttatataagtctgagacattgcatgttaatttctgagttacctgtatcctaaatgttttgttcttttatgaaattgattttcttatttgtgttttactgaggcatatgctaaaattcatctgccttaacagagtgggcctcatagttatactagcaagtgcaataagaagagatggggttatgtcctgggaattaatgttgacaataagtgtcatatacattggccactgtcaactgtgacctcatcacatcttaatggtcacaaatattctattactaagaataggtaaagtgccaaagggtacaggtggtttcctagagcgggttcaagaatatctctttaacgtcactctcacttgctaacttactgtactttcctgagacagggagactgggatagagtttcacccggacagctgggaactgctttactgcacaacccatctcatgttaccacagccttcatttagggcctgcctggggaagggatgaggcatgtgaactttcccatgtgtcaaagtggaacacgtgacccacagtcagttccacttgagagcagtagacctgtgcccaggccatctgtgcctattacctgttggtcttctccattctcttagcccagtatttggtctctaatgttcaaatgcaaatgttctgagtacctccataatactgaattttggattctcataaccccaagcagagttcgaactgttttatttatgagtgagaatagctcgcctagagtttatatttcaactcatccttctgagatttgtcagtgactccagtccgagaagagccttcaagaacacatttattagccacatgagttctttcaaagaagctttttttttaaacctttatggtgttaataacaggaaaattctgtcttttcaaaaaaaaaagaaagattatgtgagtttcaagctgttgcagactaacaatttctatttctagtttgttaattttataattctaaagttaatagagataacttagaaacaaggttgttttaatgttttaaatgtctgaaatcatttctgaaattatctctctcgacatcttttccttaaacaaggctccgcttcttttcctgatgatgaaacagatgactgtacatagtagaataattagaaaaggaagtatgggaagaaaataaatatctgtacataatacaataattagaatatgaagtataagaagaaaatactttgcatttctgtcgctctttgttgcacatacgtttagatattttgttcatcgctgtaccctgctgaccaacagacctgaaaagtagtgagatgctcagcacatatgtgtggactggatacttttttccatgttgatttcttactttcttttcaattgatggggcaccttagcaccatgtgatcagaatgtttactctcaaagcatcatgtctgtagatgaatgcttgggttgcgtgccaccctcagtaatcagtggcatctataaatttaaacctttacctaaaaatgaatggatgagtttctggagaatacatggattctgatttttatgagatcttctttaaattctgacaaagtttgtctcataaattcagtctgtaaaaaatatttcctgccccaaaagtttcccagatagagaatttactcctaagtccttttgatgggtattgctgtctaatcagtcaaaaatcttgtaggttattgtgacccactagttttgcttagctgggtaatgcaagtggatttccaagtatcagagcagatgaaaacatagtgccctcagtttctggatttttaaaattaattttgttctaccctaaaaatcatgcaagctcttgagtccaatgttctctttatcaatagctcttttattttttaattggcaaataataattgtacatattcatggggaacacagtgatgttttgatatatactaggtatagtggtcaaatcaggataattagcatatccatcatctcagtcatttatcatttctttgtgttgggaacattcgatatcctccttccaactttttgtaactatatattattattaactatagtcatcctacggtggtatagaacactagaactctttgaggctctttgaggcacagaggcctactggcctgtagccacagtgccttctttggagaatgaccccagaaggcctgggtactgggtaccaagggacaacccagtggccacagccaggaaagggcctgcatctgtgcttggagaatcacttcgtgctgagagagattcagttttgcctcattcttgccattgccctcaaatggctaaatactagattcagagaagtaaggctgtacacccaggcataagtgcttgcattaatggacatgccacactcagtgccctacagttttgattccatctcttcctcatgtggttgtgacttacctggctggcaagtttattcatctgttctcacgctgctaatagagacatgcccgagactgggtaatttataaaggaaagaggtctaattgactcacagttccacatggctggggaggtctcacagtcatggctgaaggtgaatgaggaacaaagtcatgtcttacgtggcagcaggcaagagagcttgtgcaagggaactcccatttataaaaccatcagatcttgtgagacgtgttcactaccatgagaacagtatgagggcagctgccccatgattcagttatctccacctggccctgcctttgacatgtggggattattacagctcagagtgagatctgggtggggacacagccaaaccatatcagtgagtcacagacataacttttcagattgtttctttttcccagattgcgtgaatgttgttagggcaggcagtgtctctatgcttgttttgttcctccagtccactagcacgagcgttttcattttcaaaatagatacattcagacagagaaccctaaaagaaaacctatgcagagaaaataaactggcacttttttccatgtgggttggtactaaagttatgagatgagttaagattgtctcaagagaatttggagtgggaagaacagaggtccagcatgcaaacccatggaagaccttcatttaagggcttctagaggaagaggagggtgaccacatgaaggagtgacttgagggggaagggcagaaccagaagacatggaggtaccagtgaatgctgctaagagtcaagttagaagaggactgaattgtttcctggaggacactggagtccttagctagcgcagttctcatggagggatggaaggagatggaaggcagagtagatgtcaggccgggggtgatggagacacctcttttcaagatggtagccacaggtggatgcatgcctataatcccagctacttgagaggctgaggtgcgaggatcccttgagcccagaagttcaagaccagcctgggcaacatagaaggagtccacctcaaaaaaaaaaagggtgggggtagccatgaaggggagtgaagagatagggcaatagctgtttggggtgggaggtggaggtgtgtgttagaaccctggctgggttttcattttgtttttgttcatggtggtgtttgggagtgagtttttgtaaagatgagagacactccaacataaatcaccaatggactagaaccaattattttcagcaagtttggtagccagtcgttaaacagtgggcagctcagaattggctatggtgggaatatttacactacagaaactggcaaacacaactaagaccttaccatccccaccaaaagctagctgttaaacaggtactgcatactgctgagcatatctgaatacagatagacaggatccactgtaggcaggagagacgtgcaggagagagaggagacactgatggagcctagtctctgcagatggggaaggagataggatctgagtacttacggggagattggcttttaaaagcaggaagggttttaatagggtaagtaagaaggataagagaggagagaaccaagattcataataacagtgataattatcaaggctaacatttctgagtgcgtattgtgtgccaaacactgttctgcaggctttgcccgtattatttcctgtaacagctacaccactgaggcaggtagtgtccttgtgtcttcatagatgaggaatccgaggcacagagggtgaagtagttagcccaaggcccactggctgtcaaaccttggacccaggattggaacctgatgatctgatgctccagccctcatacatagtccctgcagtttctactgcatcgcagaggatatgcagatcccagggcaggagctccctgggacccaagctccataccaatggttcaattttctctatgaaggatgcagcatcaccctcctagcatgaggggagtcaatgagcaaggtttaaagacagtagaaaatttatgaaatgatgttgtgcagcatgtgagagcaggatgtctagaggaacacgagaaaatgcccaggcagtgtcaagggcccaggtgatggtttggatcctgactgtagtgaggccatctggtgggactgtgttcttgcagacacttcagctgctccatgtaggcccagagaaagaagcccatggagctcctctatagttaggactatgacaagtggatacggcagacgacccaaggatgaaaaaatttaggaatttaggcaatttggcagaaagagcatgattgtaataatggaccgtggaatctgcatgggagaaagtggttgtggtggcaggagggggctggttgaacttgcggttttgccccggttgaagaactacagcagtggtacttactacttaaggaggtaggagaggaggcagtcttcaaaaacttgagtgttgcaatgtgctgattctggtgaacgtgcgttttctcaatactctcagctcaagggtgactgcggagggagatagcggaggggaatcgagtgaagggtcattggagatgaggccaagggtcatacaagtggatttaaaagcaacccaggatgatggtagaagctgtgatgaagagaaagactgtgatcatggcttgaaaacacttactattaaataatatgtcatttgacttccatatctattgctgatactataggtaatgtttatagtttagttccaaaactaatttgttgtattccttagggaaggaaagcatatgcctatcttataattttttttaactttgtttagtactgactgtaggaccttttattagtttttattttgaagatttagattccttactgaacctgaaaataagtagcagcatagtaaagaaatcttaattgggtgaattttcaccaggatttagctagtcaccaaaagctgcttattgatttaaaatacaacctacagccctcctcaggtaatacagtcatacttggtccaggtgtagacttggtccaggtgtgagcatccatttgaatgacaatcacataagacttgaagcttggactttcacataagtttcagatttctgtccccttttctctgctggtcttttcattgaatcctaagagaactggcattcagaagtagtagtaaggtacaccacaggtatggtagcttattttcttaccgggaggattaaataaattctcatcctgggcctgcatgtgtaggggagctgtgtctgttattccctctctgatgcctctggaatgtctaggctcccacttattgggctgtcagctggtcaggtcataccagttgaaggaaacctttcttttcctggaaagtagcctgcagtgagctgctcatgcaactgtcttttcctctggacctcatcttgaggagaacttgctactcagttaatacaaagttcgacctaactgtggtttcccttgcttaggggcagtgtttcctcatgttctaagtgggattaattttcataacttaatttaccaggtccaggaggcaagctgcagttgctatgggaacggtaactgaatttcctggcttttgtacatttaacacatcaacagtgacgctaaagtgacataagtatttatccctttccccactttcatttccttttccctttgtagatggattattgttggggaaaggagaaagaggatttaatttcacagcccagtttatctgattagtgtgtcataatatacactcggtgagctattttcatggtagttacatgtctaaaggatgcacgtgtctaaaccacttcccacctttggtgctggttttgacaggctttctgacatcccagagatccacgtaagaaatttagagagaaaaatgttcatcctcatagcatttattgaacttaacatggctttatgtactctggtaagtgaattgcaaatttagaatgctgggctcattctcatttcttcttaatcaccatgagtcattccttcactaacattgaaaggcctatcaggttagatatctatatacacacagagcgtgattgtcagagaaatacttgcactgcatttctaggccacataatctttagcctaacatttgcatattaatgcataattgtaaaacattatgtaaattatacatggtggtgaatatattatcaaatcaaatggcctttaggggtaattacaggatgctgctatgtcaactaggatgctgcaggttgaatgctgaacacttctcataggatgaaatataacccagccagggtttatctgtgtccaaagtcacgagttgcctttcagtgtgaccctccatttttgttaaatgaagcacatttggggtcacagaatattaggaatgaaaaggataaaatcctgaatgaaaaatattaaaatgtggaaaccttttaggttggcaattaatctaaatatcggagtcatagagaaaaccccatgagtattgatgccattcggtgtatttatttcagtataatttgtttattgttcttttttatttttaaataatccatgctcgttataaaaggcagcagacagcatagtctccttagggtaccccattgctaaatgacttgattcttttattggctgcttacgtgtcccctccttgaagaccactggttgatttatcactcttctccactagtccacctcaatgtctgttttgtatatggtggccacaaaagcattgtggacggaaaaaaggacgggtgggagtgagggaggaaagagattgggtcagtaagtgctaccaccatgggattgaattctgggggcaactctagtcactttgttccactattcgttaggcctgctgtattctttgtttcaataaagcttctctctagaacgtgccttttgcattaaggagatctctactttgtggctgtatccagtgctttgaaggaaggctaactctatgtagaaacccttagttttatacagtaggtgacagaccaactggtctctaggaccagttatgtctgttcctttcaaatcccttgtatcttcaacacgaaggaaaactaccttttctattctgctagatgtccatgtaaaatgacgccccccatccccattaatctgtttctggttctctgagcactctgttctatcagtgacaaatgaaggtaaaacagtttatgccaaagcaaacctaaggttgtgacaggtatcatctttgcaaaaccaaaatataaatgataaccaaatttgggaaatcgagagtagtcattgacagaaatagtcattcagatgtgtacttggaaatcggaatcttagtgtaggagcctctgtggacagaaaccttctgtgtctctgtcctcccctctcccctctgtgcctccctcctccctagcccatcaccaaattgggccagaatccagtgacttgggacattaccccaaatttttgacaaattaatttatttacttagtttatagtataaatgaaattttgaaaaagccaatgacctaatattttatgggcagtaaaactcaaaggaattattgactgaagttttaatgttttggtcacttgggttttttgttattttttatttatttatttttggacttttaggttcagagggtacatgtgcagatttgttacatgggtaaattgcattttactgggacttggtgtaccagtgtcacccagttggcatagtatccgatagttagatttcaacccttgccaccctctcttccctcctagtagttctcagtgtctgttattctcctctttgtgtccttgtgtacccagcgtttagctcccacttataagtgagaatatgcagtatttagttttgtcttcctgggttaattcactcaggataccggcctccagctgcatccatgttgctgcaaaggacatgatttcattcttttatatggctgtgtagtattccatggtgtatatgtttggtctatcgtttaaaattccgtacacccatttccaactgaaaagaaaagaactgtgcctcattaaaagacaagtcttcactttctcagggccaaggctggaattacatgattaaactttcactttgcctcttgctggttctgtgacacctgacaagttacttaatttaggttctctttatgaaagcatgggtaataattcttacctcatgggactgttatgaaggtcagtgtgatcacagatatgaaagtccctaacaaagggcctaatccatagtaggtgcccaatccacatatttccttgtaggtatcttgtttccatcctcttcctgaggtggtatcacagaaaactctaaaagtgatattgtcagaaataaacgccaacaggtggcccatgtgtagttctgtgcctgcccctgggcaagtcatttatttatcatccctttcgcttttcacatttccagctctgagtggtaatttggagccattgggatctaatgagaaaatgaaaggcattgttaccattattgctctggtgccatgaggtctctggtgggaacatttgagagaggaagacaataataaagaaaaaagaaacctccctagaattcagctgtactgtctggggcctcctgcacatgacttcaaagccacatttccttaagtggccattaaagtctgaatctccttcccagctaaaaataatttcaaatgattaacataacagtgaatgatttttggctctgtgagatattattgatggcagttcatactgaaaagcagtgaaacacagaaatggcttctgtcacacaatgaaagaggaaaaatataacaatagtccataaaatagtttctactatgctatactagaagattgacgcacataatattagttttcagcaaggataagttatctgatttttatgatgttcccataaaaagctgacacattggccctaagcttgcattcctgccttgaaataattttaatcttccactcttgacaagcactgcaaagggctgtgacttgctggaaccctgttccacagagcatctgtctgtaaaagcccccactggagtgatattttccctggtggatcagaattggctcccttgggtttatttaaaatactcatcaatatgggaaatatattggagtgaatataaaggagccatctcagggtagttcactgagctttggaaaatattccagcatgaaactctcatctgagactctaaccacagggagacctttccttgcctcaggtggcccgagtgggacatcctgagccaatgggatgcctcgtgtgtggcgatactgtgcctaatgggtatagacccttccccagcatcccccttggtcatttcttgggtgtccccatgaaaggaagaaacccacaatgggttccagaaatctctgagaaatcctttttgggtatggatgatatcacactgctaactaaagattttcggaacatttcacaatctttgaggagtcctttaaccaagtactctcagatgaggatatgggccatgtggaatcagggccagttggtttcctagaagtgtcttctaggcttccttggtcctagagtatccccagggcttcctgcattgagattctccggaggaaaggtcatatcacactcccacagaaggaatggagccctcatagaaccttcaaaaggtgtgcatttactctcatgcagacacagaatcatttcgcgtcagtacctccagtcagtctgatgaaagcctggacagattccctccttttcctcactctcttctctgcccacttctggttggcatgtcccccaccccagtgcagcaggaaagtgaagggacaggttaggtgaagagagcaagagagagagaggttggtgcatggcctcttgccttttaggttttttaagtgaatttaaaaatctacaatgaaaatatcataagctagctaaaaaatctctcctacgagggtgggattttttaaattttgcacctctgttgctgtgacttgagtgaaacatcccagagaagatgactttacatttatatgaaaccagcccacagaatcaaaaacagtgagaaggagaagggaccttagcattgatagagtcgaaggaactctagactgaagaccttgctagcctggagtggagtttcactgttcagtagccagtcatatgtacactgtgtgtgagtgtacatgcatgcacttacctctgtgcacacatgtgtgtgcctgtgtaaagttgccctttgtcttttcttcgtagcactgaaggaataacctttttctgtaaccaagtcctgccaagttctttagggttaataacatcttgctctttattaaatggtggtaatggtataagaattttcaaatggtgttagctgacacaataggaagttggtaatattatggcaatacacaaatgtaacagaaaatgttttctggtctgaaaatagagatcattaactcagtgaactgccagtactcccctcctctaaacccaatttttagatgaagcttggaaatgtgaagagaagtgttctcactaatcaacccagaggtcaattcatggtgggcatgtgcgtgtgtgtgtgtgcacatgcacacatctgcgttgaaaaggacaaactagcttctcctctactaatgatgctctgaatttgctgggctaaggtggtgttactgaagtggataaagcttctgtatcttggggacatctgaatgaaggagtaatgaaggccttgtaaagaacaaagctcatgaaagcatgaaagaagctcttgtgtagattatttcatgagaacctgatggcttaaggagaacttgatgtcacttcaaaatcattttcccattttctacctggagtgagaggtggtaggacacatctaccccacaaagggcaggctgtgccttctggtgatcactaagggagtcagtcttctaacacttcattctctttaatcctataaagttagacatattcctaaatggttcttagttttttttttcaaaacacatgacaactgtgtaccacaatatcattgattttaacatcttatatcagagtcagggtgtaaagcccgccacaaatgtattaaaggaaaaaataatgtaaaacctgcgattggtaatataatttcccacaaaatgattagaatttatttctgtctggttacatgtttgttttcatttatttaacaattatgtgttaagccccctcttcctcatcttttctatattatacctaacctactaaaaatataatacagatatttttgagtacttatcttgtgttggacatttttgataagaatttttacattaattatttaatactgaagccatcctatgaaatagatactatcttcatttccatttgacagatgagagaacctattcagaggtgcagtaactggcccaagatgccccagctgaaagtggaccaaatcagagctggaactcaggactctgaccaccaaatcccccagtgggctcccctgttcttgccctgagtatgtcattgtatttctccccctgccctccccaccatcacatgcacactcacacaaggatgaaataggctgtttggatgatagacgtttccatctgttggtgccagggcacctttcctctaagcgttcaaagggatcctgcccttggtgcctttcagcctgcttttcaagtcaaatctgtttgcttggaaacaaccagaggaagactatgcttctttaattttccatgtcatccttttcctcttcaaaaactgatggattaaataaactcagtttgtggtagggatatcctgtcctcttttctgacagtcaccgacactgcatcctaatggagcatgatctggtttaagcttgttcctgggagctctgctttgtctaagccaagaggttgcagtaggaattctaaaggatggtgctccaagaattatttatctcgttgtgaactgacatgtgaaaagctgaccctgcctggtgcccctgtcaagaaagtcacttaaaagaaactgcaactgttgttgctttttaatcactgcatttcttccctcttgggtacacaaccttgtaaagaactggctagggatctatagtcaataaaaatagcttgtgtttataaatcaccttttccccaaagtgtgagaacgactcaacaaattttactagaactaaaatcttcttgaaatattattgaggaaagctggaccactgtaaattgtaaattctttctgggtaggattctgcctttacatttctcttgttcttcttaaagcaccaaatgtttctgaatgtcttgtgattaattggttcctaattaaagttaagttgaatgctaaatcttaatgaattatatggaataaaacatgaaaatttagggctgcccttacagccgagactacagataggacaatctcccttagaaagattgtggctgcccactgtacctggatggtgtaactccagggtgcgtggctgacagggacagtgaggatgatggtgcccactagaattggcaccactcaactggatgcagtggtccagttgtgggtactgcaggacccaaggcttaacacagatgtggtgagcatgtgtgttgcctagaagccttttaccctcagaattcagggagacaaaataaaacgaatgagagatttccacccgcaggagggctggagctaacatcctcttgaacattgactcacaagctgattggggcagatcctgcaaaaagtgaccacatttcattggctcttgggaggatatttgggcaggtgaatgtggaaggggttaggtagcttgactgctacaactttgattctagatttacacacatacttgaaagtctgaagtttgcataattatggacccaggagtctttgtttgtctcctgctgtagtcttaattgccaaaagatgaagcatttgaggttcacaaagggaaatcagcctgcccaaatccacaggactcctaagttgttagagatggcattcacccaaatctttaaagcgtatgttcttcactgtatattctgttgcttctagtctggacagtgtcttttctatagatgcctcagctctttgtttcttgttgtcatttctgtatctgcatccactggtcacagaagccatgtgcacacattcattttaatgtccagtgtttatgttgcaggatgagtcacaaccgctttttgacatggctgaagggagacgtggatgtagtgggaaagctaaatgataagctttttagaaatgtgttccctgggtgatggaatatgctcagtgctattgtttttaagcagtagcattcctgctaggacaagaaatgcaatacatatgctaatatgttcatgaatggttggaaagatgtttgaatcaaagaagcttgtctgtttcacatttacagccaatggaaaatgaaatttttataacaggttttcaatgaagttgggagaggtgccagaaactggagattgctacatagtagtgccttcctctgaattactgtaggcatgcatgctatctacaaggggttggataaaatggctgccagcttttttgaaacccaaagattctctaaaatactacatgaaatagacagatctctcatatacattgagtgtagtatgaataaacagaagtttttaaatttaccttgaattgtgattatacaaaatgataaaaattttcacatttttctcaagatttccttaaaatatttaatgaaacattagtacatttcacctattattactaaccccaaagcaaaatggccccttgaaactgtatttctttatgatagataacacacactaccttcttccttgcagtgccgttcttatgctcataaccaatctcccattcttccaagatctttgaaaatacaggccatgtcttatgcatcttcttggtaggctgttagttagtgtatgctaaggggctgagggtgaatgtcatcattatcacagtctttaaaagtagattctgaaacttgccactgacatttttaaatggattttggaaaagactaggttttgatgattaaaagagaaagtaacaaatactgggagccattttaggtatactaaatttaatttctaccaaaaataaattttttatgtcataaatattaaattacacaggtatcctaaatatagtgtatcttggatttagcttaaggacatgtttacagatttctgagaatcatttccctggaggaagcatgagtctacccttagctgcgtattttttaaagatttgaatccataatctgaataaaggaatgcaaactatacattcagactttttaggataccccaaaccaagaggagtatttatttcataattaaagattttttaatgttctagtagactgaaaccatgggacaaatatcaagatttgtttaatttgatataattctgtagacttatatcaaataaaacatatcaaattctatagacttaatcaattgcacattgcatacatgtagaactgaggagactttgatcaataacccgaggagaaaggacttaagcatttttgttgacaaccctgtcaatctaagccatggtaaatgactgctaagtaaaaccagtgcagtatccggctacactcacaaaaatatagtttccagatccaaggagggagttaatagtcccgtgataaatatacttgcctcagataatatctggaatattaggaatcattctggggcacaagaacacatccagaagaaggtaatgatgtctggaagcaacagtcgatgaaatggggtatgattagccttgagtagggaagtttaagaggaaacacatgaactctcttcaagtatttcaataatcatcaagtgaaaagatatttgacttactgcatataactctagaagataaatcaggaccaatgtttggaattgttaggaaaccagacaatagtcttttgttgttgttgttttctgtgtgtgtgtgtgtgtgtgtgtgtgtgtgtgtgtgtgtgtgtgtgttttaacaaatgaaaatgccctgcaaagttgtggggcacttctcttgtgtaaccaaaattacatggcagtctttcatggacattgctatgattcaagttagagtttcctttttgtcttttgatttttggccatgtgcatatgtactaacttctcacaaaataaataacctaaagacttttttaaatgtgttttgtccatgtctggaaatgaatgcaggttcttagaggaataatctgacaaaagtactttcagggatataaaagcagagaactggattctttctgcctgacacccacccaaccccaagacatctgctgaacattctgtaaatcacagacactgctatcaggctttctttatggaagagacagattgcatcattagggagcctcagacaaacacgacctggggggttggtgctctccttggtgctgaacggaggctgggcctttgggcttcctcccaggctaaggttggccctaaccttatccctaccctgcagcaattcaggttgcacctcttgcctgtttatctgataattctgctgcctttgctaattccagctggtaccgtgactactttgattccccattcagtgacctctctctcaagaaagatgagttatgcaagaggtttgagatttggataaggagctgtgtggcaggtgaaacatcacattcataggtctatattgacttattaaacagttgcgtcttctataacttccagagtcgtcccatggtatacattcattgaatcttagtagacttagatatgaaggcaaatattggatatggtgggttgcagcctgagaaagagggccttaagggttcgatgagagctctgatagaataaatacaaaaattggaatttttaaatgttttttatttctctaatacatacaaagcactgttcttgatggctggagatagcagttctttaaactaacatggctttgcatgaaatgaaatagctttgagtaaatgtcaccaaatgacaacaggaataacttgacaacaaaagcagagatcggatgaacttggcctgtctggagtaggcagtcatattctcctgataagaggagaacactgctgggctagcagggaaaggtgcttctgcccttctgtggggtttcaacagacagaaattcactggtgtgagcattgcttcccaagagcccaggcaactgggattgagcgaagtgaaagcatcttggagatctcagaattaaaaggaagaaaaagagatgctaaaggaaatgaaaaacatggatcataagggaatgaaaggtctgagaacctctgctgtttaatgacctctgccctacagagggcagctttctttgaatcccatgaacaaatatgacaaaaaaagtcttctgacctgagcctctggtttatctaattgtcctagagagaaggatacagcaggctcccaagaagaagccacatttggggcagagcagctctgcacctttcacatatttgcagattagcttttataaaaacctgcacagaagacaaaccatttaagtttcataaattatatagccagattttaatagcaaaattccttgaggaaaggattcatttaaagtagctaactagttgtaatttatagaacagtgttacacccaattatgtagttagtaaatgctttccacagttcatgtgagtttggtagaaagagagacaaaaaaaaaaacacctttaagtataagggtaaataaaaacaaagtttcaggaaacatagcaagtgaaacatttaatcctcagaattcatcaggtgagattctgtgattaatatttcacagaaagaacttggaaagtgaaataattcatactgtctcataatttaagccagtcttttaatatctggtcaaactcaggttaagatttattagtcttacaaaaattatccaaattaggaagagtcactaaagaagcagcccatttattgaatagtttaaaacctttttatcctgagtaaaatattcttcagagctaaagtgacccagtgtacatttgcaaagctcttattatcatctcacccaacatgcataagaggccaagtagacacggttcattttttatcacttctcatttcttctagcactgcagttctttccaaagttttgatgctacttatatctattctgaacaaaaacaatatccagtcatttgtttcacagaatggctcagatcaattactatgcatttacccaaaaaggaaggaagctgaacacgtcaaagaaagaattcttatgggaaataccatagtttatgacagggcatcctgtctgaagcccttagaataaaccatgatgccttccatatttgttatcttctgtggttaaattgtctccttggatggtcattagccttggttggagcagactaaatattaggaacaaatgtttgacatgtctttcactgaagtgcagataaggttgtgattaaaaaaaaaaaaacctttgaacttggcttctacatctatcaaatagggtttttttttttggtaattgtatgtatttaaggtgtaccacatgatgttttgaaatacatatacatagtgaaatgatttctacagtcaagccagtttggcttatttcacatagttaccttttgtgtgtgtgtgtgtgtgtgtgtgtgtgtgtgtgtgtgtgtgtgtgtgtgttcagagcacctaaaatctactctcttagcaaatttccagcatacaatacaatactattgacagtagtctccatgctgttttttaggtccccagatttgcgtgcactcccttgcagagttgttgtaaggcttgtgcaccatagcaggggaatggctaattcttggttttctttcaaggctatgatttgcactattaagaaatagaactgggggccaggcatggtggctcacgcctataatcccagcactttgggaggccaaggaatcccagtacttggggaggccaaggtgggcggattacctgagctcaggagttcaagatcagcctggaaaacatggcaaaaccccatctctactagaaatatgaaaaattagctgtgtgtggtggtgtgttgtcccagctacttgggaggttggggcaccagaattgcttgagcctgggaggcggagtttgcagtgagccaaggttgcaccactgcactctaacctgggcaacagggcaagactctgtctcagaaaacaaacaaaaaaggctgggcgcggaggctcacacctgtaatcccagcactttcagaggctgaagtgggcagatcacctgaggtcgggagttcgagaccagcctgaccaacatggagaaaccctgtctctactaaaaatacaaaaaaattagccaggcatgatggcgcatgcctgtaatcccagctactcaggaggctgaggcagaataatcgcttgaacctgggagtcggaggttgtggtgagccgagatcatgccattgcactccagtctgggcaacaagagcaaaactccatctcaaaaaaaaaaaaaaaaagaaacaaaacaaaactggggagtaaatttttatttctgccaatcagttttacagctctcaaacacctggatatcatttgcctctggaagtcttccaccttcataggaaatctgtgatggacccctctcctcctgaagaaagcctacagagggcagctttctttgaatcccatgaacgaatatgacaaaaaaaggctctgacctgagcctctggtttatctagttgtcctagagagaaggatacagcaggctcccaagaagaagccacatttggggcagagcagctctgcacctttcacatttttgcccatggtttcctttggaagggaaaagctgaaatgcaaaaggagaagagagctggacgcatcacatagttttaattggtttcgaagggtcaccaagcagaatcctttctgtagcagaatagcttttccttgggagctggtatggtcagagaagaatcccggcccaagagctgaaccaggggccctttggggaaagggcctggggagtcccaaagcggcactgtccctgctcggttgcaggcagtgaccctctccccacacccgactcagtgccagctgtgtcctgagtccaaggtggtacattaggtgcttaatgtttatcccttaacaagacaaacattaacagggtggtcgctcttaaaacatggccttcccattccagtgggaagacagagaaaacaagttaaaaagaaattaaataattataaattctaccaagttatgaatcaaaaagaaagcaagggcttgctttcccagtgggtctccctcaccacgtcacttcccctaaactcattgggaatcgccatttccattctgttttcatgtctgtgaaagagataaaaagctgcccacatcaagaaatgtaattcaacccctttcagcaaatacaggatattctgagtcaactgaactttaactatccaaataggttactgcaggtacctaggccctgtttttaagtcttttaaaggacattggctttgtgattttgagctaaggtaatacataagaaaacatcttgaaaatgttaaaggaatcactctgaagattgtctcatgaaacgtgtttaaacaagtgtttaggctaagtctttccatgagaacgctcaaatatacattgtttacttgtttggtttatttgccctgaataaaataaacgatccatgttttcgctttagagttgcctgtgggttaggtgggggaacagatctcaaaacagaggcttctactctctggtaccaaggagtcagagtcttgttcagcatttaaagtcacagaatagtcataatgattatgcaaatgcacaggaatcctctttcatttgctgtcttatgaaagaattggaatcagttatataatgtaactggttgccttattttttataatttaagggaatttattttataagtgcgtaattggtaaaatagatttttatgctagattttactgtgtaaattagtgactctcagtgagtgttggttttgtgccccagggcacatttggcagtgtctggagacacttttggttgtcccaacttgtgggggtgctactggcattcagtggggagaggccaggaatgctgctaaacacccttcaatgcacaggacaagcctccctctcaacaaagaattaaccagctccagacactaatagtactgatgttgagaaaccctagcttaaatcaatactgttttgttgtaaatttcaagatgtgaagatttagttctacaaggcaaaccaatgatttatgataagagtggaatgatttttcagataaaccatgattgtaaatatttaaggtactgacatattctaatcaaagaaagcagggtttttttaattttaaaatacgttttttcaaaaaaaaaactgtcacaattttttttactaggaaaattgggaaagagaaaactagtctgtactgtatgaattctttcctggagatacttatctgataggctcaactgaatgcacaaagatctcttgctgacaaagagataatttatgtactaaaaattatatactttatttagggaaaagcctttccaatgcatacacagtctgtttagccacaattcagacacgtttgtagtgacaagccatggttacgctttatggcatttaactagaataagcccaacgacccagtcaggaaaagaggtggcaactgtgttgcagccagaatttccttactcaaaaagatctggaatgttaatgtattgattctatggggaacaggtgacgctggagtagctgaacctgccctgctgggcattagtcctcccttacatatctctcgtgcttgtaagccgaaatgagcccagccttaactggggccaaggtgtcatgtcagtccagttttgaacctgaatccactgttgtggtcagcccagctgtcttgcttaggtgttttaaagcaaacaccagctatagagagagaaggaaaggcagagacaggaaggaacaccgattaatgagctatttctgatttaacaagctattctgttaaattggcctataaaatgaaatgccaggtcatttgtattcaacaaacttgtattacagacaaagtgctatagggtggggacagaaaggtgagccagccatagctctatgcctgtagacattcattttggttcagctctttctctttctcctttacaagttaaataagcaacaacagtgactacctaagaccaactatgacatctttctaaaaagtataatatttggaaaattgtgatcctaaatcataattttcttatcagtgaatctggcttgtaaacatagagggaaaatttctatttcattagcaagcacatagtgagttgttccagtgtctcccagtgcctttcacaagcttgaaaaggatttgaaaacccctttgttctttgtactggaatcacttagcattcccaggttcccttaagaaaaaatcagaaggtgaatttgtgttagctgttattttgctccagaaactcccttgatctttcaaagatgccccttcttgacctaagaaaatctgatgcaagatacacattgtggccttccccttgatccctccatgagtttcagagaattaagattaacggcagacatttccttcattctttgatttgtctcatactttgatttctttttgttttgttttgttttcatcattctcattcccgtgtttgattcaccaatgattgcaaaatatcaaaatataaaatgtaaactgctggtctaaagaaagaaagcatactggggttctttctttggccaactcaaagcctgaaaagtagctccaagtgggtcagttccacactgtcgttcttttacaggaagaccactgggcagaggcctgggctttttttctcattactgaggactagtatcttgggattccttatgagcaaaatgatgcttgatgtttctggcagtgtcatctgagatgttctgacttacttatatgtgtagaaaagcagtttctctctttcagaggccagccctgagttagtctattgaaattgtgcataataattactggatagttatacatattctctataattttaaaaggagtcaagaaaaaatttgttataggcaacagtgaaagatcaactgactctttcttggcttatttatattcaggaagcaggaagattgtgtgtaggtaaaggtggatatggtgattataaacttaggattgatttagattttggcaagttgcttctgtgggcttaatccattcaagcctgcctcccatgagacagcctgggctcaagggccagctgggtggaggagcaatcacgggatttgcaggaagcagacagctctgcctacctaggaaggctatccttcgcctctcagagcctatgagatagggataattctaaacctcatagtggttgttatctagataatgtgtggtaagctgtggggaaatgctttgttaactctgaagcattgcatgaaagatactttccatcatagaaatatagactgtttcataatcctagactattttagggaatctgggaaaaggaagatgtatttaactattttccttttctcttaattcctttgtggaatgaggcactgcataaatatatatttttttaaaaaacctcttcttcctcccaagttcaaataagtggtatttttacttcctctctactaaaatttagtagagaaaagaggaaagagaagttgctgctgagcaaaagaagtgagcaaaggagaaacatttttagaaagtttttgaactattgtgatttgggagaaaaagagaagttttttaaaataataataacatgccatataagttctgggcaacaggcagataatgcaaatcctcagaatcttataccactaaaaggttttttagtgaaagtttgtttttcagtccagttcaagaaaaacacaaagagagcacactgagttcccatgtcccctgcatcatttctcctgttattaacatcttacagcagtgtattatattcattaccattagtaatagtaatagtagctgaagtccatacattattcagatatccttagtttttatctgatgtcctttttgtattccaggattccacccacaataccacattgcatttggtcattgatttctattccaggtggtctggattcagtctttactggtagtatgcgtctgtgtgtaaaagtagttactctttctaagggtctctattgacgatgctagtaaagcattcatagcttcataccggcgtagtaatattaacctccatcccagagcttagctgtatagccactttatctaagcaaaacataggcaacacctagcgtggaaattaaaaaataaatagcccacagcagccacagcaagtgacagcacatagctgctaacattacttctctaattcatactttattaaagaagggaagactagggaaggggaggacttgaggatggaagccaaacaaacatccaggcttggatgttacatttgagatttctgtgagacatgagaatgcagatagttggaaccatgcatctcgctgcagaaagagggaggagccaggagactgggtaagagttcatcacccagagagtgagaacaggtgttggagcaaagaccagcagactgacctccaggtttggacattaagaataggagggggagacagtgaagcaggcacccatcatagggagagctgagagagagtgccgtccacatggggagggctggtcaccacctcaaacaccgtgttgggcgagtgagatggtgacttaccaggcacccctggatttggtaatgtggagatggtgggaaagctacagctgcctcatttttaactgaagacaataatagtgcagacctagaatgttgtgagtattagtatataacacatgtgaagtacttagtgcaggaagtgtacactcacattagcttttttaatgggatacagtttacagatgactttcatgtgggttggctgctctgagtcttccatgtgatctgaaagagaggagtggccattacaatcatagtccctgctgactagtaaggaccctcaccctctggctgtgacagagttgtcaatccatccctcattgagcattttcacacctagccggagcatagcctttttgctgtattttgttttgtacaaaaataaaaacaaacctgtttgttgtaatagttttttaaaatgagtgggctctagagcttttcccttataaataaacatctcatgcttcaccctcctcctcgttgagtctgtctgacatgtataaaaaagactacttcattatttcaagtcttggggaatggagatggcatcaccattataaagagacagaggaacttggctcatgaacctgaggacccccgagttcttgatctaaagcaggcagcaaaggacgcctgagttcttgatctaaagcaggcagcaaagctagcctttggccccagttccttgtgtgctgggctccctgctctgtgtgactgtcttgctgccacaagttccaaactctcgttggtctccatcctgcctgcacattagattcaccgggaacctttcggataatgttcatgttctggctcacactctgattttctgatttaattcgtctgggataggcccagacattagtatatcattgtaatgaagtttattgagatataatttacacatagtagaatttccccttttgagtacagttctctgcattttgacatgcgcgtaggcatccattcatacggccgactccacagtcaagatctgaccatttgcatcactccaaaacctcctgtgtggccgctttgccatcctttcccccaacacctggccctggcagccactcctctgctttctggggcaccactaattcttaaatgcaggtgatttttaatatgcaactgagtacagctgcctggcagcctttaataagatgcttggggcacagggacgagaactgctggactcagttaacacagtacaggatcatccatcagatgatcttagacttaggctttcttatggcttttagctgagacaagacagttctattgcccactcttgctgctgttgtttctttatttagtggtaattggaagggagaagggactggagtgagaggaggctcccggcattgtctgcggagagcaggcctcctgaacctgccacagtgaacactgtgagggcaccagatatgtatgcagccattttttaggtgactggcactgttcccagcaatgtggacacgataatgaactacatatacagctcaaatggggcttgcttcaagtgcatggagataggcaatgaacaaataaacatacatgcaaagaagaaaatatcatgtatcagaaaatgtgatgcgcagaactgaatccaagtgatattccagagtgtgggggctagtttagattgtgagtggcccaggagagcttctctgaagaggttacattgacgctgagacttgaatgttacaaagaaagcagccatgaggagttagtgaatattccaggccaagggaacagccagtgtaaaggctttacagttggaaatgaggctcatgggcattagaacataaagaacgatgttctcaggatgttcaggatgtctcagattttggaagtgaacgtctggtcactaatgacccatttctactgtcttctgatagagcctgcatcttttccatacatattcccagtccctacctggaattacagctgaccgggcccaaagacattcagctgtaactgtggcatcactcacagggcagttgagcaactctgttttgggctgatgggctcctgcagattagcacaggaaagaaagaaatcagaattcaactaagagaaatcagtgcctaccagcagcagtagggttaatatggaaatatttaattcatcactacaatgtgccccatacaaactgggtttaaaaaaaaaccatggctctgaatattcctttacagtgaaatgtaaaattatgaaactcaaattcccagtgcatatgtaacactcactctttctttctctctcttcttttttttttttttttcaaaagtcagaaaaacagagtctcactcaaacagccaaagttggagttggagtgcagtggtgggatggtttttgtattttttttttttttcgtagagacggggtttttccatgtgcccaggttggtctcaaactcctgagctcaagtgatccacctgccacagcctcccaaagtgctgggattacaggtgtgagccaccatgcccggccatgtaactctctttaacaaaatagggctgtcaagaatacactaaaacaattacatatatcgtgaaatgtaaatgatgaatctctctacttttgaaagtgtaattagcgacaagtgtttcatcaacatagaaaataaggtcaagaaaacccgtgtccactttggtgcaactcagtgaatgagaaagggtgccgtcgcagggctcacagccagtgttcctggggtgggggttgcttttctgccacgttaactcatgtgttcttgttggcaaggtcaccaccgagcacagcttgatcctcatatcttcattctcctttcttctgccagtatttcaggggctgtgacttcaatttaaatttatgcatttattttacacgtatgtgataaactcatcctttttgtctctggtgatacttttcaaacagtgtctccccgcttccttgctccccacttcctcactctgtctgtgaatttctgggagatgttggactagtgaaaaaaaatacaaaaacactcactcctgataaacgtgtgtgtctttcctttggcacacatagaccactgctgcaatcccaactcggggccacagtagatcagtgaggtgggccaagaccttccagtttgaaatagaccttgtatatttcagggtcctctagtctgtccatgatgaataaggctttatgttgttcaggttatggctataaaatgacaaatgatcacattaatctttgtgttattcctttcccctaaggacattatagggacagccaaggtcagtgcaacaatgtagcacgagagtcgtttttccctctttcctatagagagtattgacattacctattgcatatgcccctcttttctctgatctcaacttcctactcccatatagcttttatttattttattttattattatatattttttgagacggaatctcactctgttgcccaggctggagtgcagtggcatgatctcggctcaccgcaacctctgcctcctgggttcaagcgatccttctgcctctgcctcctgagcagctggaattacaggcatgtgccaccacgcccagctgattttttttgtatttttagtagagacggggttttgcctttgttggataggctggtctaaactcctgacctcaggtgacctgcccacctcggcctcccaaagtgctgggattagaggagtgagctgccacgcccagccccatatgacttttagagtgctagaacgctaataatacaggaataagggaggcacatttgctgcttatacccaccaggatatagctgatgaggcagctacataatgccctgttcctccttcactgatggagaaatacactaacaggcagtaacattgtgcgtgaaacatatactactttaggtttgtgaccggctgtttttgttccactataaacaaagccgtacactggggaggagtggggatttggcatccacagagttctgcgtgtcacatcatgcacatgctgatggcagctgggtgctcctatgtttacatttttgccattcctgtatcagttaatgtttttgtcataatgatgctaagtcctttacatgggagttctcttctgttggtcttgcattggaagacctattatgcaagaactgtttgtacaatatcacagctacttttgtccttaacaaagtcaccatataatcattacccctgggggtaatcaggaaaatgatcccaaactatttgtttggctttatttagttttgtgctttgaggatggtttttgtctagtggtaggtgtctaagttgaacacctgtctctctaaaactactgtccagtatattagccactagccacaggtagctatttaaatttgaattaagtagaaataagtaaaattttaaaattcaatttaattccttagtcacactagccccatttcaagtgctcagtccgcacacatacacacacacacatacacacaaacacaaacatttacattatcacaggaaagcctactggacaacattgtaatatactgtaatacaatgtaatgttacattacagtactgtccagtagaattttctgtgataacattttaaaaatctgagtaaaatttaagaagtttacatctttgcactttttaattattctggatcagcacctgtaatttatcttcaatcagcatgatgttgctcatgtagagagagattaattcatgtcaacaaataaaaccaacaattttatttatctaaataaaccgtgtgaattttaagtatttattgtcgatagctaggaagaggaattagacacaggctgaaatagagtcaactggcctcaggctaaaaaagaaaattttcccctgaggagaaggtgcagactgaaacagcttctgcttccctgtttccataaggacaatgttgaagggtttgtgtgctcatatagtgcttccttctgatgctgtaactagaaaagtccaaactgccctctcagcatttcagtaccacttattgttgagtcagtattaagacaaactggaatgatagatctgttctccagttttgtggggaaaggaacaaagacacagtttgctgtgtgccctgcccacgagcaggagcctgctagaagagaacctgcccttgtatctccccctcctcatggcctgcagtcagagtgcccaggaggcttctaggcgtcaaagcagctcttattattatggaaagaatgtcagcattttgaaacagagaaaaccagttgacctcaaaccatggcatgtcataatctgtacattctgccccttgataagtatataatgtaaaggaccattcattttgtgagcctgtttgcatccatgtggttgtccttgcaaactaaatcttttttttttaaaaattggagcagtgactcattttctaaacttcataaaactttttctaattctttcaagaaaaagcatgaatctcagagtttccaagtgctactaacttaagtgtgtcctccctccaaatgtatattttgaagttctaactggcaatgtgaaggtatttggagattgggccattaggaggtaattaggtttagatgagttcacaagggtggggccctcataatgggattagtgcccttatcagaagagacaccagggagcttgccatctctctctttctaccatgtgaggaaacagcaagaaggcttccatctgcaagccaggaagaaggccctcaccagaacccaaccatgcttgcaccctgatcaagaactttcagcctccagaactgtaaaaacaaagaaattcctgttttttaagtcacttagtctatggtattgttttattgaagcctgaacaaactaatacactaagtttggaagagtaatattggaagaaaaatctctaagcaagaaggaagcttgtcataccttttcatttccaggctctgctactgagaatccaagatgtaggtgatgattagaaaattcaaaaaaagcaatgacttttatggtaagaaggaagatcaaaaaatctgtcccaaaataccttgagcatcctttgggtcactggtgtggagttaatttcttgcctccacaaggcttctattaaaataagagaaacagttctgggaaactagggtgccccctgggtgaagctccaggggtcatgagcttgcacaggcaggccagcaacctaaagcatccagggacaggatgaaggtggggctgagttcaggttgttcccccttaggtgggagccaagtgggcaggagaaaagtcaggaacaccttgagcaagggagacatgggaaccaatgggatggggagggtgaggatgaaggtggagctggaggctctgggaagttgttgtcaaggggatcgggaccaatgcttgttttgtttagctttcagtgacaggatctgtacatggtttcctgattgaaaagcacagagccacagagacagctaaggaatatatctttttaagatataggggatgatgggcaaggcaggtgcatccactcaaacatggtatctgtgttaagttggcaccgtgatccctgaaaacatttgtttcactcttgattgcagtcttcaggctgtctttccaatgtgctaccttttccataacttccatagttcttttatttagtactaaaattttaagggtgtcagctgcccagattaacaatatcttgaagccatatacattcacgtgtctgtgtgtgcatctcagtatcattcattcagacaaaatgaagtgatgtcatgaaacaaaacacaaagcttatgttttgggttggtgagggagtcggactagtgagcaattctgtgagttctgatacaaaacttctgttgaccccagctcacttgatactagccccttcctctcttctactctgtctgaattttatttagaacagagtttgcttcacttgactttattgtcagtcccttgctaggggcagaaaacctgtgcccagtgtgctcaggccttccgatggcccgattcctggcactgcttcctaagtcctcaccacaggaaatgtttgtgccttcctaggtagcagctcaattattttcccatctcctctgtcataggggttagcggacagagttggctggaacccagtaaaagaatggccgatcactttttggcttgacctggggagggaaatgcaagcatcagtgtcagcctgtaataaatgaaaggttattgaaaatcacagaacaacgtgtggctcttccacataatgcacaggaactgttggcattgaacatactcacttgaggaacttcttcatctcagattttctttcattaaaacattaaagggcatattctagtcttttatataggaaagtcaccatttgattggctgtgagtttaactagtggatctggaaaattccacaaattaactttcaactcctcatttattatttcattagaagaatatcttttattctgtagtaaccccatggtatttctctttccttctcattatttctccacttctttcctgtgcctggctcctcatttacactggccacttcattctcctgtgatttctatgaactcaagcttcagagtgacctttgtttcttttatcttctcttccacataaaatttgctgagaagttcttttgaatattttcttgccttgggagccaaatcctggtgctatcacttttgggtcattggatccttaacatagctttcctccaactccaatatcttgcatccattttaaaaagaagatgaaattccggcacctacatgtgtggcccccattggtggacttcctcctgatttcccatcatttcctggaagtaacctcctataacaatcctaggccgggcatggtggctcatgcctgtaatcccagcactttgggaatctgagttgggaggattacttgaggttaggagtttgagaccaccttgggcaacatagtaagaccccacctctacaaaataaaaaattttaaaaattgactagatgatgtggtggcacttacctgcaatcccaactactcagtagccagaggtgggaggattgcttgagccaggagttcaaggctgcagtaagccaagattgcactattgcactccaacctgggtgacagagtaagaccctgtcttaaaacaaataaataaataaattagtaacaatcctgacatttgtatgatattaagcatcttcaaaggtactttgtatacacatgagtttgctagggctgccatgacaaagtacagttgacccttgagcaacatgggtttgaattgcatgggtccacttatgcatggttttttttttcaataaataggttggaaaattttttagagatttgcgacaatttgaaaatactccaacaaactgtgtagcctagaaatatccaaaaaattaggtatgccatgatgcatgaaacatatgtagatactactctattttatcattcactaccataaaatatacacaaatccattacagaaagtttaaatgtatcaaaacttaaacatttacagaccatacatggcatcattcacagtcaagagaaatgtcaacaaatgcaaaggtgcagtgttaaatcataactgcataaaattaactgtagtacatactgtatgactaatggtttcatagccatctccttttggtgttgcagtgagctcaaatgttgcaagtatctgcttaacacaccatgtgatggtaatcatctccagataaagttttctctctggtaaattgtgtattacagtgaaaaatgatctctcatagttctcttttatttctcatcaagtttagtgtaatcctttaagccttgaataacatcatggacccataggaagtaccactaatcatgctggaagtgcttccaagaagcaaagtcatgatattataagaaaaagttgaattgcttgatatgtaccaaatattgaggtctgcagctgcagttgcctgacatttcaagctagattaatccagcataaggaccattgtaaaaaagaaaaggaaattcaggaagctgtttctgcagttatgcagcaggtacaaaaatctttcactttttatgaaatacgttttaatctcatactgaaaatgcagcttttgtgtgggtgcagaattgctattagaaaagcatagctatagacttgaatatgatccaaccaaaaaagaagtcattctgtgacaacttaaagcaaaaggaaggtgaaagatcaaaatctggagaatttaatgccagcaaaggatggttggataattttagaaagagatttatctttaaaattgtctagctaataggagaaatagcttctgccaacaagaggaagcagatgagttccaaaccgccattaagaaaatcattaatgggaaaggatatctgcctgaacaggtttttaatgaagacaaaagtgccctatcatgggggaatggaaaatgccaccaaggaatctattggaaaggaagagaagcaagcaccaggatttaaggctggaaggactaggttaactctactggttctgggcaaatgcatttgggtttatgatcagggctgcctttatctataaagctgctcacttccaacccctgaaggaaggagataaacaccagcttccagtcttcttgttgtacaagaaggagctctggacaaaaagaacactttttctggattggtcccatggatatttgtccctgaagtcaggaagtaccttgccagtaagggactgccttttaaagttctttccatattggacaatgcccctgccacccagaaccccataagttcaaaatcaaagaaactgaaacagtctacttgcccccaaacaacatccctaattcagcttctagatcagggagtcataaggaccagtaaggcttttatctggtttactttattgtaataatacaatatataatacatataacatgcaaaatatgtattaatcaactgtttttgctatctgataggcatctagccaacagtaggatattagtaaagttttgggggagtcaaaagttacacatagatttttgactgtgcaaagggttggttcccctaacttccatgttgttcataggtcaactgtaccacagactgagtggtttaaacaacataattttttaaaaaaatcatgattacagaggccagagtctgagatcaaggcattggtttgttcctggggcctgtctccttggcttgtagatgaccatattctcgtgtgtcttcaaatgggcctccctctgttcatgtctgtattgtaatatcctcttcttataagggcaccagtcctattggattagagcccaccctgttgtcattttaacttcactctttagagaccatttctccagacacagtcacattctgaggtactggggttaggacttcaacataggaatttgagggtggaaggtcacaatttaactcatgttattacacatttttttccctctgatctctcaactgtgtgaagttgtgaggaattagaagtaattcatctcctaaacgtatatctgatttgtacatgggaatacaatgtaagtaagtccactaatgctctaatttttttttggcacagcactgtctctcttatcttaaacctaattgagagagttactagctaactgttcgcttcctccctttatcttctgttgtctttattccgcacccctgaagattctgaaccacccactcccttctgcctcgggcaatgaatagtctttctcttagtttcctccacatctcttcgcagttctttagggatcaattctgatgatcttagtctccagtattcatgtccctgatctcacatcatgggacagatttgccttgcaatttcttttccaaattctgtattcttatcagaaacatctgtcatcaaaacactgcatttgcctcatttcatcagatattcagtgtaccgggacccttgtagccctactccctgggaagggacattcaggccttgacattggaatgctggcttgctggaaagttataatccagtgtctgtttggtgtattttttttttttttaacactaaacacatggcctagacattggttttgcttcattttcgctcaacatttatgataataaagctttgttttcatagatcacttatctcctgaaaaattcacactgccgtgaacacgatccagccttgcagtgtgtctcggaggtaagtaggtggcaagtatttttatccccttttattaaagcataggcagagctcactgcacaaggatcccctggaagggggaacaatttggacttagcccgtctgcgctcctcctgctccgtttatttgggtaccataaacccacccagaactgcacacagaagtgtctcctttgcaggcagacgtatatgcatgcatttcaatggcttccaggagacagcgattatggaatgtggagtctgaatgtaaatggaatttgagatgagcctgactagtaaattattctgaaggaaaaacacattcagaaatatgattttatcgcttctcggcgttttggctaagatgaagtgtagaagtatgatttagattccacccatccttaggtgcaattcaaatgccagtttctctaaaaaataaagccaactcttcccctggactctccagacacttgacctgtccttactttgtggtgtataactcactgcactttatcttgttgctctcctggtcagagtctatgcctgatccatctctgtggataagtactcagaaatgttttctgaagtggaatgaaaggaactaacctctgttgtttgtaactggcacagaacccaacagtttctgccagtgacaggtcatgagcatcttgaggcatccagaagattgtcgtggttggattgtcctctcactttgcttcatgctcactgcttgaccactgattattttggagaatgtctctctccttggccaaggctttgggtattataaccaagagaggatgatctaaccagccattttatcaacagcggctctgagagcccagcgttgggtgccagccctgcagagggacattgcgaagtatctttatgtccttcgagcatccctcctttccatcaactggcagggtggagcaatagcatccagttactgaccttccaggaataatgtgagcattggatgtattaggcctccaaagtatatctgtgctgctctgatgaaaggtgctttaagtagggttgcttgttaaaaataagtagtgccaattctcaggctgccccctgtgttttcctttcccttgctcccttagatgtttttcaaaggtgccaataaagcctgcaaaacatgggtaatgaaaaggaagggagagcaagttctttttgtcataagcgtgaactgtgagtcatctcttctgagtcaccgtgaacatacaaaggaagccaatcagtaggggtgcactctaataggatgtttctccaatgactcacgcaggcctggaatgaggagcagcctgaatcaagccaaacaagtatatttttaaatctggaagggcgcgcttcctggtgcaatatgatgatcagtcctacacacttacatgcttattttagcccaggcactgaaatgtgtgggcatggtctccacggagccttctcctgtggtcatgttttgttttgccagtggggaaggatgtttaatgattaactgtcactatcaagaatataatatttcagtgcaatatttcaatgtgaggagaagaataatttttgaatgtggtgacttcaagaactcggctccattgggtaaggcctgcttcacgtgtaaacatgcattccacaaacattttttgaggccctaagtactgaatatataaagacagagaaggcgtagtcctaagcctcaagggtattagaatttccacaaggagacaaaaaagcaaacagagcattggaaaagtggcagagggtcagatggagacacttagaaggctcagcctatagagaatgggcgtaaaagaatcccctggaagtgggaacaactgctctggattctgaaagacctgcaggagttaccactgaggagcgaattgagatgaggaagggtgattaaggcagagggaaaagcatgtattaagtctaaaagtcttccaaacagtttatgtttttcattattgtcttattttctcaaaattttgcaaatgcaaaattttcttcttttcccttggcaaatgcattctggaaacattttttcaagctgacccagaaaccatctcattcagggcgagtcagggtccgtgttgtgaagaggcgttactttatctgaaggattttaagcagaggctatacatgtggctatagttaggttttgatgagctcctcatggaagacagtgagggaaatggatctgtcccgagactgggagaccattgtagccttttgtcttaatccggaagagcagtgatgagcacctgaaccaaggtcagtggcagtgggaaaggaaaggagtaaatataatatatttgtgagatggtgattgagagaagagtcaactgagcaaaaatagctgagatggagaacctagtaagtttggataagccataaagaataggagttatgttttgtcaattttgactttgaggtggctaagagatgtggctaagatgggcgtgtccaataaggagttgtctggagctcaggaaactatcttggttcaaaatagagatttggcatctatgaatgtagaagctacaggaccagattagtcctcctagtgcaggagtgaagagtgagaagaaaagaatggtgagaaaagaactttgggcagaaggaaaacgaacaaaaacaaaaaacaaatctatgaaggagacgagaaagagcaaggagattgggaagaagaacaattatccaggtatctcttctccagtattagtgagctgatgcttttttcccctgtgaggtagtaatgactatcaaataattttgaagccattcataaggaatccacaagagtatatacacactcgatagaatgtctttcttactaagaaccatgttgtcatattgggtatcttattgtacgttatattaaccatataagatatcctgggtcactgctatgtgttgtagaatagtaaaaatgctctcttgttttagagaattggcaagtgtttataaaatgaaagtttcagaatgcatttgtcaggggagaggaaaaaaaaacagtttcaagtattagtaacaaaattgaatgactaagaaatgaaataaaatatctgtgaggaataggaacaaaaatgcctgagagtatcaacttgcatttcacataggaggaagttctgaacaatttcatcagtatttttcttcctttaaaagcatcttatgtttagtctcatccttaggttttcattaagttgttttcttatctaaaatggtctctccttagtgaagatttttaaaaagagagagagagaaagatggccgccaagaagctggagaggaaagtagccctcactgaatttggtttagggcaaattctcctggaggcaatgtctgtgattggattatagccacctgaaaagacttgcagggatcttatagaaccttcgggggttgattatcattataagtcagtaagactgaagaaaaaaagtagcagacatcgagtattacgaataacttaggaggaaactaaggttttaaaaaagatcttcacccattaatttaagactctaattcttcacaaacatacatttctaaggcagaatctatacatgcctccatcccagtggcccaggaataaaaaaagaatgttttattcgtaggaataccaattagcttacgatgctgtggagaatgaaaaagtagactccttataccaataacaagagtttaagcctaattttattagggcatttttatggtgcaaataatttttattaactgcaaaaccagattcccttccaggatgtctgtatgttcaatacattctgagagcacaccctagtgagtatgctgtgttatactcaaatttatttcccaaaataccaccaaaacactaacatctgttgtgtttggttgttttggtttggttttgaggctctttctgtgaaataaagaaatccagtacttacataatcttcataatcgccgtgattttttttttttaaagaaatcagtgtgcatggaattgtttgtaatgattcaaactgatataatttggctacttactgatgagagattctaaaacctgagacacctggggtaatctttgatatgtatgtgatcagtcaggatcaaagaggcctgtggtctttttatgtgaactgtgggcaaattcacatctcctactgcataatggcagcaattatgtatttatttagcttctgggccaaggagacctctgagtacactggttgtgcacagatctggttaagatcacaacctctgaaagctgcttgcctcctgcacgtacgtctggctctgcctctctctggctgtgtgactcgggcaagtcacttagcctctctgtgactcatttttctcacctatgaaatggaaataagacccaaacctgtcttatggggagttcataggagaactacataatttgataattgtaaaacactgagaacagtggctgttatatattaagcactatataaatgcatggcaagaaataaattggtctgattagcttgattttcttaatctttcaggatattagccttttattaaaggaaatggatttggtgtcttgtttactaaaatcagaatgtacagcctgggcaacacagcaagaccttttctgtacaaaaaataaagaatcggctaggtgtagtggcacatgcttatagtcctaggtacttgggaggctgaggcgggacggtcgcttgagcccaggagttaaaggatgcagtgagctgtgatcatgccactgctgtccatcctagcaagaccataagactttctctcaaataatttttttttaaagagcaggatttataaaaccaataaacaaataagtagtccttgaaatgaaaagtctgtgaattgtctacttttctccccagtaatattaaaacaataaaatttctatgggaatacatgtctgccatggataaattggaaaattctgtgctgttttatcaactgtaaggattgcatgtccaaaaaattatgatagttggcaagatcaagtctccataaaaatggtaggtcggaggaaaaaagaagtggaatcaactgtttttaaaaatcacggcaaataagctttctagaaagtattaactttctgccttaaaaattgtccatgaaaggaaatacttctccagtgagcagcaaaataccgggaattctgtacccaaactggtgttaaaccctggctctccctcttgttagttctgtgagtctgggcaagatcctttactcctctgtgcctctgttttctcatctgtacaatggggatgataatagctgcactaactttgtggaactgttatgaagattaaatgagaaaatacttgttaaaaaaaaaaaagacagttctcgtagtatggtcattgcaatattctaagataaacaactcacctttctaggctgctctcttaatttgctgaagcagattcccccaagtgtcatgttactcagattatgtccttttcaagttttccagccagctgttactggtttgatatttaatgccttatcctttagcattcctttttttttttggtaaatctcagttaagtgcctgtgtggagcttgaccttttcctaaattgttatcacagtgctggaggatatgcttcttggggtctggggttgtgttcatgtgctaagagcgcctctctgtgttccactcacaacctttcccacacgagcttgggtagcaaagagctatggtccttgccaccctcacttgtttaagggactgaaccaaacagtaaataggcaaaaatattaaaatatttaactctatttttgtttactagtatacatctctatcctttcgaatctcacattagcaaaagcatgactatcaatggatcattcccttaatatcccctgcgtctcccttaaatgcctttgtccaggattaacacatagttgacaatgttatgcagtccttgaggtgatatgtttatcatgacagaggctgagatgagcactaagcccagtacccctgctcaaagtaggttcctgtaaatggggcaggtggtgcatggtaaagggaatccccttgctggggactaggtgttggcagttgtacagaggagggctatgtctctgtattttaaaaacgtaatcagatttgcttttgttttctgttgaatttgtgcaatgaatttgcttctttgtgatgttattcattgttctcttttaagagaacacctacactcagtttcagaaagttgggggagagagggaggaagaatgggtcattttgaaggatgaactattttaaggcagtgggtgaagcttgtggggagccttccagagtgctgtgtgtctgtgctggcccagctgcaggaggactgtggtgtatgttcagggatactccacgatctgtgcctgaagtggaacataatgaaagccacatagaagaaaagcatgtagctggaggcatgaggaggcaggaaaccaaggaagggagtgcagtcatgtgtttctggaaggctggccatgtgagagccgtgaaggatgcagacatgacaaagccagcctctccactttccctaggtttctaatcaggcgtgggaatccaaatagaaggaggaaatgaaagacctatggaagcataaagaagtgggacagagctttagaagtgaagtgccattagcagaggtctgggctttggaggttgactcagtggggtccaagtagagggaaaaccaagagctaagcatgtggaaatgcaatcaggggtggtttgtttgacacagaggtataaattatggttgaatttagggtgcattcacagagaaaagcaagaagtagtggagtgggctcaagtttagatgagtgttgaatgccttgctaaggtatttgcatttttttctaacagctacaggtgatcactacaaggtaatgacttttgaaggggagtcagttacagagcaccaaagataagaaagaacctgttcaatgagcaatccttggcatttatccttaaattcacatttatccaatacagaattgcttatttttagcccattttgccagctccctagacgtggctaatgctctgagccccaggttaaggtgtaatctaaagtcacaccatggctctgcaagacagacacagttcttactgggtcttcagtgagggacatcccagctgctcattaatctgcctgtatcccaacataatccttgggtgcccatctcacatggttggacaggcaattacttatatccacagtaaatttgccatatgacagtctcttaatgcgccacttctctgaataattttcctcgtaaagaaagttttaacaagggtatgcagaaatcacttcttgcatatattttcctttgccctgccttgaactgtttaccacacaactagaattttccttttcatcttctgctcctccttcttgtattagggttatccagagaaacagaatcaatagaaaaaaatagatagatagatagatagatagatagatagatagatagaatatataatatatatatttggagagacagagaatccttataaatctcatgtatatatagaatatatatgatatatatgtatgtaagtatatatatatgagatttatcattaggaataatctcatgtagttatgaaggctgagaagttctacaaactgccatctgaaagctggagacccagaagagctggtggtgtaattcagtccaagtccaaggacttgagaaccaggggaactgatcatgtaactcccagtccacaggcaggggaaaatgagacgagatgtcccagctcaagcagtgaggcaagaaaaagggctaagttcctctttcctccacctttttgttctattcagaccctcaagggttgggcgttacccacacaccttgggaagagctatctacttcattgagtccacttattcagatgttaatctcaactgggaataccctcacaaacacactcagaaataatgtttaatctgggcacccattggcccagtcaggttgatgcatagaattagctacatctccctatgcctcatcaataccactcccagaagataagtaaaatctatttagcaagataagtgtttcatactcagttttgcattgctaattcacatcacaaacttgatactcctctccaaaaaattttttcattgttgttgttttttattgttattttttctctttgggccaagaacagcatttcctagacctaaaagcagctccagtaaatgattattttgccaacggatgaagggtaaatgatccagcttctgtttctgtgcacatcttgattgttttcaactggaggacaaaggaaaagagcaaacacagagcctattggcaagaccatttttcaattataagcaaattcccaggggttacttagcatgcacttaccagaaatcttaatttgctggaatttctgcatattttgcctttcagttcaacatctcacaagatgaccttgggaatgctgctctataactttctaggagatcagggtacctttctaacgcgaagctaagtaaataagatttcaccacaagttaaaccttaaatcaaggacttttttgaaaaaaaaatcatatttgtattctgtgtaacattttatgactaatatttatgaagtgcttaccaaatgtcaggtgctggactaagcattttatgggaatctttccactatatcttcagtcaattctacaagatatgagtttttgttattcccatcatagtagaagagtctcagggacatgaacagacttggttgggatcacacagttaagtggcagagggagaattctagctgcagtcctaactctagaatgacactcctatccactttgtgctaaggtatttacctggttcatcactcatccataatacgctgaaatatcagttcactggattccagaataacaagaatcctcagatcacctgaattttaatttcattaaacagagaccaaaataaaagtaagaaaagagatggaaagttgtcactttatcacactcctattttaacccctttaatggcttcccattgaagttcacctccctaatgcagtctacaaagcgttgtgcgaactgatgcctgccagtttcttcagccttgccttttaccaatctgtccttgctcatgagctcaaggtcacacagataataagtggcagtgccaggatccaaactcagacagactggctccagggccatgctcgtgaccgtcttgctagttagatggatggatggaccgaccgacagatggaataatgtgcacatgaatggatggacagaaggaaggagaaaaggagggaaggagggagaaaggaagcacccataaatggatgaaggaagggagggaaggaaaaagagagggagatgatttgaaagaaacgtgcaacacttcttagagttcatacacaactagtcaagtctattacagtttttgcattgacatctgcagtacccttcaataagactgggatctccattcacgaaagaaaatgcattcataggccggtggctcatgcctgtaatcccagaactttgagaggctgaggtgggcagatcacttgaggtcaggagttcaagaccagcctggccaacatggtgaaaccctgtctctactaaaaaaaatacaaaaattagccaggcttggtggcacgcacatgtaatcccagcacttgaatccaggatgcgggggttgcagtgagccgagatagtgccactgtactccagcctgggtgacagagcaagactccatctcaaaaaaaacaaaatgcatgcatatactcgtttatccatccaacagatgaaattaaactaaagtttaggtatggagaggtaccccctgcccaacttcagaagctgatagcagttaggtgattggtccaggatgcctgcataaaccagttatgtagtttttttacccagccagtaaacttagttacataaaatgtcaatccctatttctagaggtgatgggcaggatatacacactcattctgaaaagcccactgaaatcatatgtatgaaatgttatagttttatcttgtctactggatagacaggatatctgctcctggaaagctcatattctacctttttaagttaacttttcataaaaagtgtaacttacatagaggtgttcaaatccaaagaacacacacaactcaatgaatttccaaaccgccaactgcccatgtaactgctatctagattaagaaaagatattaaacaaccctcagaggccccctcttgggccatcttcccactctcagtttcttctctcttccaaaagaaccaataccctgtttgcattatcatctgtgaattttgcctgttttgagctttaaataaataggatcatatcctatggtctcttttatgtggggctgtttttgctccacattatatttgtttcagttcattcatgctattgtgaaagttatttgaatacactcatattgtatgtagcatttttaaaaataatttctttgtagtaagtatgctgctgtatgaataaaccataatttatttatccaatctgctggatggacatttagattgtttcaagtttttggctgtaacaaatagtgctgctgtgaacattcatatacatttctcttggaatgcgtatgtatgcatttctgttgggtttatatctttggctagaattgctgtattataaagtaagaatattttagctttagtaaatactgctaaactgttttacaaagtggttgaacaattttacactcccatcaacagtggatgatgattccatttgttccacattcttatcaacacttcatgttttccatcttttattttagcccttctggtggatgtttaaaagtagctcattgttgtttaaagctgcatatttttttctgtgacttaaaaagcttagctccttttcatgtgttcattggccacttatatgtcctattttgtgaagtgcctatttacgttttgcccattcttctactgggttgtctgtctttttcttagtgacttataggagtggttatatatcatagataccagttctttattagataatgttgaagttttttctctattccaaagttgccatttttattgtatattttgacaaacaagttcttgagtttaatataatagaatcaaacagttttcttatgattaatgatatttctgttttgtttaagaaactttcgcccaccttaaagtcatgaatatattcttacatgaaaacaactttattgtttttccttttgcactgagatctataatccacgcagaactgatctttgcagatggtatgaggtagggagtcataattcatttcttccagatgcatatacaactggcccaattcaaccaattgaaattcctttccactgcagtgtcatttttgtcataaatccagtgactgtatatatgggtctctggactccctattctgttctattgttctgtttttccatccatacaccaataccacactgtcttcattgctgtcattttacaagtctttatatttggtcccaaaagttttccaaatttggcattttagctaggtacaataataattactttgttattaaaactagtaacgactgacatgtattgagttctttatctcggttaacatatgaatcactctacatttaatcttaacagcaatctgataagatagaaaccattggtttttctttttttcttttcttttctttttttttaatggggatatagaggcctggaggaattttaaggtgatcaaggtcacattgctattaaatagtgacgtcaacatttgcatgcaggccaacctgactgcagaagctctgctcttttattaactgtgtgcctgggatgtggcctctgattacttttgctgaattggctgtcttttggtgctatgaggctgattttcagccttaacactagtcggtattttttttcctctctccatgtcctcaaaaaaggcccaagggaaggtgaacaatgaagcattgaataaatttcatgctatttttcagtataaattttatactatttttaggatacaaaagactatccagagttctattaaaccagacttcaggagctgagaagagctgcgaaggtttaaagcctctgatcccctgtcctgaaatagcaggggtggtagcttctatctaggctgaactcataggcagtgaaggaacttcaagttcttgaccccactctcctcttttcacctctcccacctacaaaaggttctgaacttttagcatctccccacgcagtaccaccttccaaaatcaaactgttaaggaataccaggtttaaaaatagaaaactcaaagttttctaagtacggtaagattatttttatacaaaggaataaatatacatctgcatcagagaattcataaatatattatccagactgaccctagaaccacaaatagttctaatgtaagtttctgtgctgtggatcaccaggcagattttaatgactgctctaacaggttttctgtgttaaatgcctttgtgtgtgtatgatatattccatttttcctgtaattcataattttacaacaaaacatccattgtgttaggccagtgcgtgtgtttttcaaagtgcaccatttccaaaggcagttgcaatagctcatgaagtcatggtaaaaaatattcatatttgcccagtgctcccaaatctctgttatttgtaaatgggttcagagtctctcttagcatcaccaaggtcatagaaaggatggaacagagcttttcagcatctcaaaatgtgtatttgtctttagaaaattcctgtgagagcgaaaatggtatgcattttcccgtcgtcttatcattctatcattagtcaagtaatttccttatgaaatggtctgcattaggtaggattaacaagttgagaaagtgtaaaaacaattggcgattttcttacgaaagaaagaataaatccttgctcatcaaacatttgctaaacctatcaaataccactctaatgtcttcacactctaaattaaatgtgtagtcatcctgtcaataaaggaaatagtagtttgggaactaaagttcagtgcaggcagactctctaagttctacaattttggatgggctttggggagttgaagatgtattatctggcatctatgtatatggagactgctggaattttggacttggcaggggtcttacaaatccattagcccaactcatttgcaggtaggaaatctggagcccagggagctgcaatgacctttgtaaggttatggtcagctctagacccattccctacgctcatttttcattgcttgtttgctacagtgcagtaacccttgttttctgagagccagtgacaatacctgccccactacacattacccagtgaaaaataggaacatatctactttgacaggcaaagtggtacataagtgtacagcattttatttttatttttaaaaatatgtatgttcaggttatagctgctttcaaagctggcttgcttataagtgaatgagatatcagcaaattgtaccctcagtcctgaaaatatcttaatattccagacttaaaaaaccattgtgttgggtttttaaaataaagtaaaatctcattgtgttaaaaatagtgtgattaaaacaatttcgtttttaaacgtcttactatttttgtcccattgaaagtgtctctctaaatttcatttataaaatattgtctgctaattcttttttctcagtaagtattgttttcctttaaaaacaataataaacctcacccttcctggttttctttgtttatttaaacctaagaactctattcttagacttaggctatctctgcaaggtgacaagctctcgtgtataaacgtgtagcctgggagaggctccacttgataaatggtgaacatggccaccgtgttggcccacacttggattgagcttgctgtcttagtcactgttcccatttgatcctcacagcgaaatgatgaagtttgtatccaaatacacaaaagccttttcactgtttcttttgttacctgtcaagaaccaagttattcttactttgttatttgcctgtatctccctgcaaaggaggagtcttcaagaatcttagaatgatggcaggccaaccccttcatgtggaggtcagaaacaccagtgctggagatacaatgctgggtttgatttctggcactgttgctgctagttactcatcttcacagttcctcaattttctcatctgtgaaacagggatgataataataggacctttgtcgttgttacacattcagagagttcagacaggaaaagctcttagaatattaccctacacagttacctcctcatgtgaaatttcagctttgaagtctgaatagttcagtaggtttttgacatatcatcaagaatgattggttgactctaagcacccccgccccccgcttatctatgggaccctaaaggccattcaccagattcctctttccttcctcatctcctagaattgttggagtctttaagaggctatataatgtgctgagaatgatgattaaaaatagtaactaatagccaccgtttactaagcctatgccatgtacttgattacaaatagtaactagctgtgcctgatggcttatgcctgtaatcgcagcactttgcgagatcaaggcgggcagatcacctgcggtcaggagtttgagaccagcctggccaacatggcaaaaccccatctctactaaaaacacaaaaattagccaggcgtggtgtcgtgcacctgtagtcccagctatttgggaggctgaggcaggagaatcgctggaacccaggaggaagaggttgcagtgagccacgattgcacctttgcaccccagcctgggcgacaaaacaagacttcataaaaaaaaaatagtaactaatagctaccatttactaagcctatgccatgtgcttgattaaaaatagtaagtaggccaggcacagtgtttcacacctgtaatcccagcactttgggagggtgaggcgggcagatcacctgaggtcaggagttcaagaccagcctgaccagcatggagaaaccctgtctctactaaaaatacacaattagccaggtgtggtggcacaggcctataatcccagctacttgggaggctgaggcaggagaatctcttgaacccaggaggcggaggttgtggtgagctgagatcacgccattgctctccagcctgggcaacaggagcaaaactctgtctcaaaaaaaaaaaaaaatagtaactaatagccactgtttactaattctatgccatgtgctaggcactttactgcacactttatatacataatctaacttgatgcttacggactttatgtagttatatatttcacagatgaggaaacaggttcaggggggtttatttgtctaaagttctatggcacgctagggggcatcacatttaattattcgaatgcaagtctgtctcactctctatcctgcctcctcattcctgtgttttctctgacctccagtgatcttgagcacatgttttcttatgctattgtcaatgtgcttgcttgggttttttttaatatattagtaatttcacatggcttaaacaaattacataccaacaaattgtgtacaaagaattacattcaaaagaattccaattccatttgctgtggtgtctccacagtgtcatcaggagctcctactaactgtctagggtatagccctcatttttatgctgacaaaatggctgcaggagctccagtcatcagtcctgtgttccagacatgaagaagttgaagtggggaggcagagacaaaaggccacaagtcaaccaagtctttccccttttaaaggtctttcctgggaacagtgcccagcagttttcacttatctattatttgggattgggtcatatgacgactcttaatcacaagggaggcgcaaattgtacttttttagctgggcacattgttgtcatgaacaaaactcaggttctattaacatgaaacccagctggtgagctttttgaaataaatcaaatacactcattcaatgtgacctttccctagtgcctgagtacctggggaaaccttgatacgttagagaagctgagaaagataaaatatcttgaggaagaaaaaagggttggttcagcagaagctaggaaccaggtagatgatttcttggctgctcagcaaggttgagagtgcagctttgcccagacccaggaaaggaggagtaaggtccagaaggggagcgtaaccctggtattccagtctaactccatgtaagccacaagtagtaggaggaaagcagaggaatcttacacagtaaatatacatcagcattaataggtgaagctgtgcctcttgtaaggttttacttcataaatattttctgtggatagaaaaacaattgtttcagatttgtgttggtggaggtgcattggaggcagggttaattgagaaacagaatgaggaaagcaagtgaagcagaataatgatgcgctttggagccaactcgaccttgaattctagcaccaccacttgcaaaccatgtgaccttggagaagtcaccgagcctttctcaatctcctatttataatcttaaaaagaagttagtaatatcttccttttgtgcctgacataataagtgactatgaagtccatcattcagtgcccggtgcgtggctgctggcggtgcaggccttggtactgctatctcatggccgagtgttctcagtcagcaggcactggctacgcacttgctgtgatccacattggactgcaggtcatgatctgggtttatgttgaaggaggagtacgggagacctaagagaatgggtggaggaattaattttcaaagcagcaaccacagagaaatgcaatgagctcttgatgtcaactaaaggaggaagcctgctgctgggtcagctgactgtgggtttcagacgctcatttggggccaactaaaaaaagctcatgatggaaggtgttatttatccaagttttacctttctcatatataaaatgaggatgtccataaggcctaccttccagggttgttacaagaatagtgcttgtagagctgttggcatgccatatgtacccaacgaattatctagttaattattaatgatgtcacttccctctttacccaagcaagagtaggacttgcaagtctcagctttttctggctttcttagctccactcatcacataaaaactttagggcataaagtacacaaataatcacactagatccaaaaatgatactgtgataatgtgattaataacaaattcttagatggcaatagtgttttaaggtacagctgaagatttgtaaatttcattggctttggtgcttataaaagggagaccaaccgctcattgcccagggcagcaaaccacacagtctgccagtgttgatcttctgagtttcttaaatagctttgtatcgcaagtcaaaacttcacatttgccatctctctgctagtaacacaggctggggtgggatcacttatatgtttttgcttctaactgttgaaatgtgaacaggctggactaggaattagtgtggaaaaatcacagaaaaactcacattcctggaaacagtaggcaggtgcaatatttattgtcatcaccaccacttccctccatatcggtgttaacttgtatcctgtccaaagcactttgccctcagttggcttatttgatctgctttgaagccaagggagaaggcagaggggacttcatttcctattttttctttttttctgttttttgggagacggagtttcgctcttgtcgcccaggctggagtgcggtggtgtgatctcggttcactgcaacctccagctcctggattcaagcgattctcctgtctcagcctccagagtagctgggactacagcggcatgccaccatgcccagctaatttttgtgtttttagtagagacaggatttcagcatgttggccaggctggtctttcaaacttctgacctcagatgatccacccgcctcggcctcccaaagtgctgggattacaagtgtgagccactgtgcccagccctccatttttttagttaagaaaattgaagctcagaaaggtaaaatgacttgctctggattggcctgggctgcacttgaacccaaatcttctgtccccccaccccacccccggactcttcctacaggactgtgcattgctccaggcccatgcccttactttatctggaggaaaacagcattaccatatcttcaaatcgggttgtgccctttagaaatggtgagctgtgcaaataaacaccactttgctgttgttttaaactgttaagaagtctgaaattcactgtattcatgaaggttgaggagagaagaggttggtgtgtaatagcttggtagccgtgtatccttgagtgtgtttccatgaggcttgatcagggtttgttcactgggggcctgctctataggattctaagtagattcgctgctcatccacatggcaggcaccagggctctccccgagaacagaagctctctgctataagcctgctcccacccctccctccatcctgtcctggacttccagggcctgaaacccttccattctgagccttgaggatgaattgaccttaaaagagattccaacagcaaatgaaacaccttgtgttctcactcagaagtgggagttaaacaatgagaacacagggacacagggaggggaacaacacacaccggggccagttggggagtggggggactgggggatagagagcattaggacaaatagctaatgcatgtggggcttaaaacgtaggtgatgggttgatgtgctgctgtttaaaagcctgaaagtcatccagctctcatgcaaaccaccatgttacatatatacctatgtaacaaacctgcacgttctgcacttgtatcccagaaattaaagtgatattttttttaaaaaaagagattccaaataaaatagaaagactttcactgtatgtaacagcatatatatttattttttaaaaaccttagggtattggttctgggggtcacaaaccttagttccttgggctccacagtatcctcatccataagatacgagtggtaagaggaactgtaaagatcaaatgaggtataacttacaaaagggctataaaaatgtaagcttgacagatgggatgatgggaggggctgaggaggaggaggaggaggaggagagtagggaccagacctaaagttccgagcactaggtgtgacccaaggaagctctacaatgggggcttgaaggcagttttggctgattttatgattttgcccaggactggaccagttgccgccttcaaagctattcaggttgctttgacttccagccatctgtgcctggaaatgtaaaacaaatggttaatggcatcagatggttaatgatctcaaatgttccctgcttactgccatgagagagaaaagagcctcctggagaaataatcatggatgctgtttccaaagttgcaattaatcgtgtattcaggaaaacccatcttctgccagttattctgataagaaagaggaaattgagggtgacggaggagctgtgcctgagagggcagtttgaataatctgtataaggtcaagaaggcagatatagggctcataatcaacacagcagttttggaacaaagccaagagggtcttgtcctggcatgggttagggactgacttttatgagtccaaaaatatgtgtctaaggctaggtctgactatctggccttaaacttccgagttgtatgggggccatcctttggttgcttttttcaaaaatactttttcaccattattgcctgaaccaaagatacctccgcttgtctccctttggggcacatacctgtggttatgttctcgtgtttcactgttttaaaactttttctcttattttccatctctttcctccagctagtgagacctgcaacgacttccacccgatgttcttcacccacgacagatcctttgaggagtttttctgcatctgtatccagctcctgaacaagacatggaaggaaatgagggcaacttctgaagacttcaacaaggtaatgtggatctcggatagaggcaggggattcccgcagcgctaaaggggcctgctgcatggtcccttggctgtgtgcagaaggcaattggcaaggtggggaaatgaggaagattgcaatgatagttgcttcaagaatggagaaagacaaacatccctgtgtagacatgaatctgtgtgctggggatgacctcatccctctgggggtacgcttggagcagctttgttcctttgtctaagttggagccaccagcagagagtttttcttgggacacgttatcaaggcgaatgttttctttcatagcattagtttgggatgccttgtcaatattgcaagatctgtcggggaaggggccttccctccacctgtccaggagattggtacagagcaaatgagatcaggaatactgctccacctagtccggtggtttctttgtggattatggatgtgttgtgatcatctgccccgagctacgtcaagaagaatttttattaaaatgaaagatccctttccaagaactgagtcattaaggttatatgcaacatttcttggtttacagtaagcatttgatcctttgaactgagatgtcctttagttttctatatcataatgtctcacaagagtgtgactttcacatttccatttgtgtgtgaataaccagcagagggaagagcattggccaacttagagcagaagcactatccatgctttcatagagaagcaaaatctttgtccttagataaaggcctgattagcaataataactattgcagcctttagtacttttaatttgctgctatatacagctgtgactgtggtcaggcccatcacccatgaccactctcacccagcactaagggctgtgactgtaagagtcgaagggtctggccctcagtcatactgtggggctttcatgggcgtgcttggtgcataacataatctctgaatttcacctgcacttaatatacttgttggtcattgcctccctgtcaccttctccctggatatacatctcatccttgtttcccactatatttctcatttgtggcatcttgaaccaacaccaattgaaaagaaagaaaatcaggaaaaggacctaagcttcagtcaggtcctaacctgagtttcttcctcagcacagtgatctcacttgccatatcatctctgtcatcccaacgatctgtcctttgcatcttggtcatcgattgaattccttgaaatagaccccagtaatgcccttctgtggagagcactggtctggaagctgcaatccagagctgtcatgtgtctgagcagctatgccggaggacaggcttgattcaagaagggaagtggagaaaagaagcccattaatttccttaggattataactgcagcctcctaagtgtacttcgcttgattgtgagagactttgcatttcaggtgcaaatcatccctgggaaagagggaaggaggagcagggaggcctttgttcaatcaaaccaaaaaagagaattaaatcagtagtctttgaaattggctaagggactaaggccactttgccctggatcatttcagctctttcatgtgctgctgtgtgaaagccatccagtcctcagctttgcgagctggggacacctgttcctccaggagaaggagacctcaccagttgttacggatttgggcatcagatgtctgctttctgagagatctcatttatcctgcttttcctaaattataaattctgcattttgcagaataatatctgcaaataataatgtttcagatattattgttgttgatctaggcacagataagctgtgtagaaaatattatgaaagttctgcagaggactgactctggggatgagcattcagacacttaaatcctatagaagttacattttgtaacatgaagcaccaagagttccttgttagcaaaggaagccggaggccccaggatggaggaggtgggcacagctggtggagggaggtgaccatagctctagggtccctgtggcttatcatggccatgtgctcagattggtggcagacatcctgcctgttcagggccctgccaggtgacagcaagccccccagagtgtcactgtgaaacttttatcataattagcctatatggctgtgaaatctcttcagcaagacctaagagccaggttttgggtgcagtttcttaccgtagctctaatgccattttttgcattgtttacagatcatagactaatgctgggggtcacacctctattgccaagtagggatgacagtttatggctcaggacaggcagctccaggcctgagggccagaggttcctgcctcacatccaaatagccatcaggcaagagcagatatcagaggaaaatccaggatgggaaggacaaggaattttaattttctacattaaatactttcatcgtgtttgctttttttctctttttttcagtactatgcatgccttacttatgtaaccagaaaaatatatcaggtatttacatttttgtcatgcgtatataacttttctgttgctgatacaacaaattaccacaaatttagtagcttagacaatgcaaatttatcttacagttcatagttcagaagccagcaatggatttcactaggacaaaatcaaggcggcagcagagctgtgtttctttccagaggctctaggagagaatttgtttccttgcctttttcactttctggtggtcacctgcattccttggcttatgtccttcttgtccatcttcaaagccagcaaagacagcttgagtccttctcagatgccatcccatcaccctgatccctcttctgccttggtcttccacctttaaggaccttgtgattacattgggtgacctggataatccagcatcatcttcccatcttaaagttggctgataataaccttaattctgtctgcaaccccaattcccctgtgctgcagaaggtaacgtattctcaggttctgaggattggaatgcaggcaccaatgggaagctgttattctgcctatttccagtgtgtatttgatttgcagctatattaggtttttagatgtgtagatcagtttaaattaatgaaacacggacagaggagccttttgtttgcttttctttttgctggtagacatgatacctgtcacagagttctgctagtgacagctcagatgcagatataattatgtcccttttcttttatggccctgttccgcctccactagcctttttaaaaaggaagcctctttgtgacagcttctggttcattttgaagactgcctttctgatttttttctgctgcccatctatcagccactgttctgctttacttgataataagttggagaagagagaagagctgaaagttaaatcagttcacttttcttcttgttattaacttggtagcagaggagattgaatttaggaacaaatgtgagttgtgagttactgatagatttaatgtttttttcttattctctgactgtccaaattcaaattcagaaatgtctttaaaaaagcccaacatgaaacataatttcttttcaactttcttggacactatctcaggttcttgccactgtaaacagagcatggaaggtgggtttatttgtcaaccctgagacccagggctctgtgagcagggcttagctatctgtcttctttagctcctcactggagaaggagtgcccctcaatttaaaattttgatttgcccaacaaactatgctggattctatcagaggcaggaatagcttctgcagcccgccttccttgggacaccagtttatagatatctagtgcttggtagttaatgccactgctggaagagggtgtttggaaaagcagctgtcgtctgctcttccgggcttgggaagcagcagatggaatgttttttatttatataagagaagtagaattgaagagtgattaaaatatttatgctttgaaaagtactttctttcagtttctcaatatagcactctgcagaataatccattgattcaggccattgagtgtgtgttctatcattaccaatattttagagcatgcattattcatttttatgggcattagagaagagctaaactgcagctggatacctcagcacacaagtagccccataatcatttcattgaaatcctcatttttgagcgggataagaaaggggacacaagtaacttggatattttaggtatgggaatctcatttaaagcatgtgtggctaactactccactgtaaaaaaaaaatgtaatgagagtatacactttagagtatatgtctgtgtgtagcagtgtttctcagctttagctgtacgtcagaatcacctgggggcttttgaaaaccctgttatcccaccggccaaccgcaccacagattaattaaatcatcgggggtggcgggggaagctatgaatgagtattttcattaaggtagatttgatcattaaaggtgatttatgttaatagaatcgccatcattaacacatgtgatacttatcacaagctactgtaaatttcgtgcattgatggagtaggatgcttgttgacctgtgtgacccaggttttcatcctggatctgctattccagagctctatgtctgagaatctaaaaataataatagtttttaaaaggatacatcaccctgtcttttggtggggtgataataaattgaagtaattactgtaaaaatgctctgaggaagtaaaaatggtatatgtagttgtggagtgttcttttgtactgaataagataaagcctgtctatgaaaaatgagtaaattgcccttttcacaaacagacattttttggctatgttaaaaaaaaaaagtgaagctatgaatttcacagtaaattctgaactgaattagtaacccatgtaactttgacaaaaataggctttaagctgaaattttcatggattttggaagtgtcttcctccaaacaactttattaggtaccttagtttcccgtgtgaaacacacggtagcaacctaaaaaacagcaggtcccatgattttcacatatttaatggctggtgagaattaagtcctccccaacaattactagttgcccagatctcttcgctgatgattgacgcttttataaaccatcaaaatatttgttcctagcattggcgttactttagacgctatcaaaattgacattataagccaagatcagatgattgtgccatactttcagattaccaaaatggaagaaactaatttgaaaaatgaagtcactctagagtaaaagcactatcttgaaactttatctagcagcataataaactaagcgcacacaatagagcttagaatctcaggcttgcaaatgaaaaaccatcccttaaaatagcagagactgtgcacagggagaacccaggcccattaaacaaagctgcagctgcccctggccaggctgtgagcttcaaccgagtcaatgggagaaaatctcaattaggaagaacgggagagcaggacagaaggaaacatcctgagaaatctcctatgaagattattcataggaaataaccaccagctagtcacatctagtggattatagtgtgggatagaaaagggattgtgtttaaaaccttaaaggcagctaacacatgaataaaaaagggaaatgtgtttgcttctcaaactgtttgcagcttactgactttctgtgcatgcttttcaggggacaattatatattcaggagtctccttactagggcagttcaacttcatagtggtgcagacggcgctctgttggttagctgagctggcctagggaatgaaaggtggtctgtaagtctcatcatgaataaacatgagtctcctcatttgcgtgaggcaggtgactgtaaaatatcttggagcaagctgtgaaaggaagctttgtgcatccatgcccaggggaagctgggaggactcagcgttgtttatcttcattagaattccatctagtgctgctgttattgatctgaactgggcctggtgtggctaataaagtaggtgtatgttttaattgaaacatgaatatttgagtagaggagaagtcttttaaagagccctaatgtcctacactgagcttttccatttttcaactgtctaggcgattaacaagcattttttttcaaaaggcttctgatgtttcacaaaggtcttaggtttgccacacaggcagtggaacctcctctagaagcaaatgcattatatgaatagatttaattattatttctttgatattccctgttgaataggtagcaaagagtttcatatgtgtgtctgtgtttaagctgttcatgtaagatagtgttacctatttccatggagtttgccgctttctgttggacagcaatcaagatatgtcctctccaatccttaccagtgtcaattatactatccagagacagcagaaagaccgggaaagtgactttggtaacttatctttttcaataagtgtatgttcaaatagaccccaatgtcatacataaacagatatgtgttaataacaggtaacataaccctggccaagtcagggaagcactgtggtacagagcaatatttctccttctcttttgcattatcaccccgctagagagttttataggtatttttccccaatcaccctccccctgaaattgtaattacagatatattgtatatgtctttgtgtatgtatacctgtgcctgctgtgtaaaaagagtaatatttactcctccaagaaccatttttgtgccctccctaaggatgatgtccccactccctcatcaagaatgcatggtgcaaaggcaagaaccaaggctgaattagcaggaggatctggtggcagtcccagttggcccctcacagcagtgtgaccttgagcttgttctttaaccaccaagtcctttctcacctgtaaaccggtagtggcaatagtaataaataatacttcccagagtcactgtggggattaagctctcattaggtttgctttgcaaattgtcctatacaaataggaggtcctaatctcaacaggcaaaacctaaagtgtcagtaatttgcactttatcatgcagtgtaattgagctgccttgatttccccagatagtttgttcaaatatccataaatacagattgttttatacctctgtatgggggtgcgttgaactttagtttggccacagaggggattttgaccactgtggtcactcctccccagcccacccacaaacagatgtactgcaggtgaggcagggggctggggacagtacataaaaatgccaagggcctcccttccagctgggtaaccttgtgcaagggacttggttctgctggcttcagattcctcatctgtgagatgggaataggtaattacccacagctaggatggctgtgcgccctgatgacatcaggcagataaactggcaggctcagcactggcctggagccaacaccagtccacagtaatggagagcagggagaagaccaggtgacacgggattccaaatgcctctgaaaaggaaaaggatgctcatggcaacactgagagcaaacatcttcaggaaaggtggacaagctgctccctcaagtttagtgattaacttagtagtgactcttttttttttttttttttttttttttgagacagagtctcgctcttgtcacccaggctggagtgccatggcacagtctcggctcactgcaacctctgcatcctgaattcaagtgattctcctgcctcagcctcccaaatagctgagattacaggcgcccgccacgaggcctggttaatttttgtaattttagtacagatggggtttcaccatgttggccaggctggtcttgaactcctgacctcaggtgattcacctgccttggcctcccgaagtgctgggattacagttgtgagccaccatgcccagccagtagtggcttaacttctaagtgtgctgccgtggtggtctcagctgcatggggtccatggcagcttttatgaagaacatagagaagaccttagagggtgaccaattttcagggactgtcctggggttgtgcactgtaccctgcatctcccaaccctctacccgctgaatttacagccctggcagcatctctttataaggaaggagcatgcgaggaatctgagtcatccagaaagagttggattttgttgaccctgttcatgtaattttctttttttctttttttttttttttttttttttttgagacagagccttgctctgttgccaggctggagtgcggtggcgtgatctcggctcaccgcaacctccaactcgctggttcaagcgattctcctgccttggtctcctgagtagctgggattacaggcacgcaccaccatgcccagctaatttttgtatttttagtagagacgaggtttcaccttgttggccagaatggtctcgctatcctgacctcatgatccacccgtctcagcctcccaaagtgctgggattataggcatgagccaccgcgcccggcccatgtaattttcataaaaatggttaaactatttaaaaacctgtttaaaggttgactgctatctttagctgaaggcatttttaatatgttttgctttctggacattttctataacaggagcatttataaaaatggtcttgaccaagagtgaatcttaccattttgaataagcctgacagtagtaaatatacttcttgggtattcctttgtgttcaagattttgcatgaggtgcttctcatttctgaagtctttctagagccagtgtctatgtttctttgcatgtgtagcacgtgctaacttgagatttgccaattaggaggagaaaataattgatttgttcttctgctggacagcagtgagatatatcagtcccttggttcaatttctgaccatccctgagcatgagaataatgatgactttaggttaactgctttccataactctgttcagtaacttctgaaacttctttcattttattaactatacattggggctgtgtagaaaccagttgttaactggtttctatgacctgaattccagattccgttgtggattatatgaaaggtttgataatgtcacagaaaccattttattagtatatgtcccattaaaaggaaattacctacattttaagtaaggcatgatgagatttaggcattttaaattaaagggcagataggaaccagagttggatagctaagaagggtaccattaggtgggaatctctcatgaaatacaaggcctcattgatttaaaaaaaatatttatcttgtaattgcaaagtaaatgatgttacatgggaggttaagaacacatttccaaaaagagatgagtctcctaaggcagaacagaagagcacataggtgctgtcatataggtgccccctattgccaactgagggtaccagatgttgtgatgaatggagggttgagggcaacaaggggccctagacaagataaaccaagcagtcagagtgagagagtgggatcagaagctatttgcaaagacgccaaaacaagagctagaagaagttaggagatcctaagtgagatttccaaatgttttctgcggaataccagatccaggtgcttggtagttaaaatatatatttaatgactaaatcataaaacatgcatattcaacttcatatgcatattcaacctctaatttacattggttgtatgtctgcaaatttttcagaactgtgctcttttatctgagcaacagtgacttatgggtcaagattatctgccttcatttttccaagtaggagctgaacactgatcttccttgttcaacccacacactgaccctcctgctctgtcaccagcatagagccaagtcattaagtcagacaggtccgaagcaaggacagaggttgagaggccagaagaagatatcaaagtaaggctacatttggcagtggttccctccttcttttctcttttcttttcttttctttcttgtatttgagacgttgtctcattatgttgcccatgctcatctcaaactcctggcctcacacaatcctcccaccccagcctcccgagtacccgggattaaaggtgtgagctaccactcccagcattccagcccctttttggcaattattacagggagaaaaatgaacattagaacttgaatttgagagatgataattccaaaccgaatttcttcttctgcccgcctccttcttccctttattttctggtttctatgtgttttcttcctattctagtaaagttaaaataatagatgatcaggccaactgtgtaggaggaagtcatttaggcaggtaatcagctcagatatcaatcggaccaccaccttcctcaggaaagtgctcaagcctgcagctatcacttttggcaacaactcactcagatgcccctgagttgtccctcttgctttgtccctaggaatacctataccctagaacttatgtcagtgaactgcaattgcctatctggcttcctaagagcagagccttgctctttctgtattctaagtatctagcaccatgcctaggatctagaaggtactcaaagttactatctcaccaccatcatacatacagcacagccacatcagcattccacatcttggttaatagggtcaatatccaacttactcttcaaatgctattcattctttcaacagatatttatttgtgtctacaacacagtgcttgtggtagacactgggagtacagaggtgagcaagacaggatggttcctgctgtcatagagctggcagtctagtaagtttctacttagaaatttatgggctagtccctctttgtgaaactgattagtggccaaagtcggtacaatcaccacatggtcctttaccttttcatcattgcctcagtttctgtcttcctcttctctcaccccaatgtgatagattgaatggctggtcacagttctgcactgcttcgtggtagtagcatacttccaaatccttgccatgacctcatgatgggtgaagtgaatttccttcaccctttgacttttgtcttggccaagtgaacttgcttgggccagttgagatgtgcatggatgtgaaacgagcagaagcttgactgttgctcaagtgattgagctgggcttttgcacttttaccatcatcatgagaactacataccttggtagccactgctccttcagtgtaggtcccaaaatgagatatatggagcgcagtttttccagtcagcccacagagcttgaaagagccacctcagctgacctgtagatctgtgaatgtgagaataacttcttacctgttggagttgtttgttacacagcattaacatgacaatagctgactaagacagcaactgttacaccaacttatctcccagcttggaaacctttccattttccgaatctcctccaacacagatctgaccatatcattcttgcttttaaaacttctgtggctgttcattgcctgactcattaaattttgtggcctcagcaagatgttcagatttatctttaattcacctaaagtaatttttctgctttatctccatatcttcaccctgcacctaccctaggctctacctgaactgctcttgtacgtgcaattgcattttcatgtctcattccctctaccagaaacgtcttcccccatttacctgttgaaatttcacttatcctttaggattttgcacaagtgccaccttagcaagatagttaccatctcccttttatttattcagaatgaaattttgtatgtctactcccacagcatggaattcaaaattttttggaaaatatcttctagttctatagcagttgtttatttttaagtctgtcttcccaaataaatcatatatttcaatatatcattggaagcaagagctagattttatgtcttaatatcctccaggtgcttttaagtagtatctgctcaaatactttgtgttgagtgttgaattaattaatggccagaaatgtttaattcaatgatcattaaaaatggtccacctgaccagtaagctgaattcatatacaccgtcttaatatggggtggccaccgttgttcaattcctgaaggccatgggtattttgaaattccacacaataaagaattttcttgccccaaatgccaacaggccttattgagaaacacttctagacccctccatcagaatctcttcagatgctaatactctgaggaagttatgaaatgattttgccatctgtttcttaataaaaatggcagttgtcattatttttctgcctatgtagctttatataaggtgaatagaaagcttcaaagacattgaacttttgcaaaagaaactgaattgttctttttccaagaagattggttggaactccttgttaaaaaacgtgtgtgtgtgtgtgtgtgtgtgtgtatacacatatacatatatatatgtatatatccctctgtttcattttcaccttcactcatttattatattgcccttaagcctgcttaacccacataccctggccattccaggagcactgtttttcccactagccttgtttccaggccagtgggaaaaataacatcagtaatggcgcttgttctttcccaggatggctgccgagagaccttccagtgcaaaggacaaatgtgactgtcaaccttccatcccatgtaggggactggtacttagccaagcatgcctaggaaatacgtgcttgtgcagcaggaatgttgaatcacatgtgtgaacacatcatgccgttcacaaaaattatcttttgtattttacctttacctcccgaagttatcttaaattggggggaaaaaatgcatcccccttagaatgtcataagagtgggaagacccagttcttgccacagtgagagttttaagtgctggaggcaatcagctccccagaactcttctggtcctattttccttctttctctttcacatatttgtttgcgtggcttggctggatccgaggtgtatggcatatggctttttgccgcttgagctgccacagaagtaaatgtcattggcatataatgccagatttccattttgtgaatcacagagcacgggattctgtccgaaagctccctggccactatgtgttcttaaagcagaagtagaaaaggaaaagacccacgcatcacacagagatgcttttcctattaaaatgtatttattgccacaacaagtatatataaaatggacatacttttgccccaacgtgtgtttgaaaaaggttcttggcttgttttattgtggttttggcactgggcaagcctggacatttgcttccaagcctcagctgagcagatgctggtcggtcagggaatcagatgaataaaaatttgcttgtgcatgtaccagaaaaaaaaggctgtgagtaaaagataatcaatgttttttggatgcagtttaccagaattttttattcattaaattttcaagttataaaagcttttaggctgataatggagacctgaagctgccacagatgcagcctcagcctttgctcccctgcatggctgagaaatcaagagagagatttgcagattcaaacacacacacacacacaaagatgacatggagccatatgcaactgccagtattggactgtttttgtctgacaaatacagcaatttcaaatggctcaaccaaaaattattgtacattcgtggaatcagttgtatttacccataagcatttactgttggtttctgacacagtcttcttctattattcacagtacctatttctctttctttattctgtgatcatttaactcaccataataagttgtagtaaagtctaagtcaggagcattggccctggacccaaggagtgggattcacaccctagctccttcgtttccttgctgggtgagcttgagcaggttaattgccctgccctgtatcccggtctcttcgtctagagactgatcgtcatggagttgttttgaggatgaaatgaaccaagattaggtggaaccacatgaaatggccaatattggaccacgtctgaatggcaaaatttgtagttctgttctgctcatcttaatcaatgaaaagcatttggggccattcccatgagggaaatgacacgaagatcacacagcacacatggcgctccagatgaggcatggagaggcatggattctagtccagctctgcctgtgacctcctgcgtgacccggggcttttctcctatcctgcactcaccaccctccctcctagacaatgctgtggccccggggatggcctccttctgtgctttgaatttcatcccctctcacctgctctggggctctgtccgttatcatttctaatctttgcatcattagtctcttcctctcacatgctgtcttctcaccagaatataaacacacacaaatctcccacattcttaataataaataaatgattttctcaaccccctattcacctgtgcccctgcagctcggtttctgaagtcattgcctcagtttcccagctcgccttttcatgtattaatccactgcagcctgccttctgcccacaccgagaatataactgagcaaaagaagagaaataggactctaaaaagcactaaaatatagtgtcagtccttgaaaacctctttagccacaaaagtcactgattttgacaaagaatggcctccggtggacagttttaaatctcaatcttgtttgccacctttgtagcccttgaccctgtgaaccactctctccttaaaaattttttttactgtgactttggaaatgaacatacatgcaagatagatatagatatacagatatagatacagacatatatatatttatatatgtatacaatgcacctaagatatatgtacaaatggcacattgaatatacgtggaagaaataaaataactattattgttccagttactagcaacatttttagaaaaaaaattaaaggataactaaaaatataactgagctcaagagaagaaatacgactccaaagtgcattaatatatattttgaatacttgaaaacctctgtagccacaaaagacatgatttctaagaggcaagtgggaattgagaggagtcgttgagttgttctaaatttaagactggaaagaagtcacattgttctgaatccctgctctgatgaagaagagagacatcaaaaaatttataaaaatacatcttttatcccttacaccttcatgctattcgcatcctcccccacccccatctcttctcttcagcctaaaaatataccaaaatcattcctttccttaaacaatattttccaaccctgttcctctttcaagttcttatccaatctctgtccgtctctgcactgccaaattttccgggagagaatgacatctccactttcccacctcctcacctcgacgtggtctgatgttcacccacacccacctgctgcaattgcttcatttagctcaaggtcatcttctgattgttcttgttcatcctgttccctggctctgaggcattgacttgtgttgcctcctgtgcttcctgggatcctctccattcctcattcccatggcactgacccctttagcacaggcattccctgaggccctcctcttttcctctcctaccactgcctcctccccaccttcaaccagcacctgaggcagacagaattccaccctcatcgtcttctgagctccacccctgtggatggtctgcagactcctcaaactcgggatgtccaaagctaaactctccattctcatggctccgttcctgctgctgcttctgtgggctctaactccaggagtgacaccacaatcaccccatatcttggacttgaaatccaggagagatctctggcttccctaccttttctctctagtaggtccccaagtcctactgattcaccactctatgagaagggccacctgccttttaatgctgtgactccactttcctgcaccattatctcagccccagtctctgtgcaggaacacatgccagcatgaaaaatcaattggcttttgtcaggccataaataccaccaaaagaaaatctaaaggtgttgttaagacagaaaaaaacaaaatcattttccttctctcctggaaatagcttaaattttttttctggtcttaaaagaaatcattcctctcaagaatcactttctcctgtcatagcttagccaccctgtgcctttcacttatggactcagtttgttctgtatcctgccttcccgccaccatcatctcttgtgtagacgatgtgtttgttttttaattggtcttcctaaatctggacttgacccaagcctaagttctctctcccctagctgccagaaacacctttctaggacacagctcttctcatgagacatctgtcttcaaaaacctctggctctctcttcttccagcaggatagaaaaactccacattctgtcctaaaccactcttccaaacaacatgtctattacgtctagcagcacacctcctactaacctatcgttagtcatactgagtgcccagcatgccttgcacttcccagtatctgtccctgattgtgttccctcagcaaggaggaaccttcactctttccggtgaaaaatctgcctgtccttcaaggcccaactcatgggccctgcaaagtccctccatggggacaggaggaattttccctcttatgttcacttttcttcccctctcttgtagcacttaacttactcagctatatgctaagttcggaaacttattttagccaattatctttgatttaaatgggttcccattcattctctgtcccacctcatggctaccttgaggcaatgctgcagaattccaaaggcttgaaaatcatatctactctctctgtttcttgactctacccctaagaaccaggactgattctcactcacctttctaccccagagtgcctaccaaaaagaaagaaatatatatgagcttaacaaatgttacttaaattgaatttttatcctattgttgaaaaaaatagctaataatgtttatttttaaatcagctgataaggtcttaaaaggaaaaagcacactctaggacaaactttgcaatctacagaacaaacagtcttatggactcagtttggcattgaagggcattgtgtggctatgacaggaaaaagagtgattcttctagtggcgatttcttttaagaccaagatgaaaaaaattaagctatttccaaaagaaaaggaaagggaatatttttttctgtcttaaaaacgtctttggattttcttttggtgatatttattgtctgacaaaagccaattgatttttcatgctggaatgtgctcccacacagacagggctgagatgatggcaaagacttcccttcccaaaccacgctgggctgagtctggagatccctggcttccagctgtttgtgaggtcaattacacccctctgcatggggaggagacaaggttcctttggctcatcatcctttggctcaatgttggaaattcaccaacattgattatctcatttgtagattatctcatttgtataatacagccatttagaatcatagtcattcaaggggggaaaacaaagatgtgcatatagatgttcatttcattgttacttacgagtgagaaattgaaaatagcccaactattcaacagtggggattgataaattaatttatggatacatttatttatctgttaaaattttttttactcattcagaatgatattcatgaatagtatctaaatatcagaaacatgttttgtagtatattaaatgtgagtagagcagcctgcaaaattatatctcaactaaataaaactacaaactaaaaaggattgaatgattttttttttttttgagacagagtctcactctgtcaccagggtagagtgcagtggcgtgatcttggctcactgcaacctccacatcctgggttcaagcgattctcctgcctcagcctcccaagtagctgggactaaaggtgtgcaccaccatgcccagctaatttttgtacttctagtagaaacggggtttcacaatgttggccaggatggtcttgatctcctgacctcatgatctgctcactgcggtctcccaaagtgctgggattgcaagcgtgagccacggcacccagccaggttgaatgattttaacaatggcttctatgatgttgggttgtgggtttgaaagaaaaatggtttcttctgcatagtgtgattaattatatttttcttttttactatgtctttaatgttccccatctttgctacctaacatgtattatcttacaatcatttttttaaagaaacactttaaattttgtgggtgtggaactggcaccaagctccaggtgtggtctgagcagtggtgtcagtctaggaggaatttctttatcttgacattccatgttataacttcaggctaagtttgtttattcttccttgaaatagagcctgggtttgggccagctttgccagcccagctagtgcccagcatcttagcctgaagttgattggtactgagatcaaaagcccttcaggcttgattcaagaaagactcattaactggaaggaagttctaagcagatgtgatacacttaagaaagtaagccacattgcagacagagctggacccagcacctagaatgcttgtaaaatggatttctgaaaggggtagtgttcaggagtgcttctacacagagcaccctagtccctctcagactgagattgcaggagtgggaggaggaaggaatgggagacaacaggggatgagtcattgagatgttttcagatatcctcatccccatggctgtacctacgatgctggatagaatgacagaagtactcagaagaaggcttgtataacctctctaagtttaaggtttgcagtaggattttgtcttcttggctaagttaacagatacatctagagatggtattcctggtgttgtattagtaaaaccagccctagagggttcccagtattggtgagagctgtgaaaagagctaagtgtgcaatagccatagcacatatattgtatggaaagaatgcaaaggaaaaattacatagaggaagaactttatttaagggagcatcatatgaatagaagctctccaggtgagcagaatagagtctgcttggaaaagatattaaatataatgaaattcatgaacagaaaatgtaataaatggaactttattgttttcaagacattaaggctgtattcttgggttcccaagacttgaaggaaacacagggcgacatgttaaattgcattatctcaggcacttcctaaatattacttgaataaatgcaccaactcctcacttcccactgggatttttttgtgtgtgaaatatgttttctcagtgtatgttcagaatagctgagaggtccaacacaatagactctcacaaaacataagcaagagcacttattcaaggttcagtgtatgtgattgtttcaaagatttgcttcgtcgttctcatgcttttcattgtgtggagagaattgtaggcaatgcattttggaaaccatgttctaaatttagcttgagatgacttggtgggggtagggatacatttttccattgtatatacatggattggttattgcccttcagggccaatttttatttttaatatcaaattaactcttttctgcaattagtagcttcaagttgcaggcaagtactggacaataaaataaaattatatttttttctaaatttaatttctccacaaattatgttatagagcttattcttgatgaagattgagaatagcctgtcaaatatcatttgcttaggggtcatggttcacatttcaaagcttcctttgattggaagtattcatagatagagaacagtttgaagcgatctggctcttacatgctgttgctattgaaagatgggtttaagaacagcaatcctgtttttgtgatggcagtgctggttcactaagactaggcacacacttagttggtttgtttagagaggttatgtgttgttgctgatattcattgtgtgactggtttctgataaagccaacttactaccaagatccaaagttaaaacaactgggtttaaacaggactcaccctagaatttcatatggtgactcattgggcctatgggtaccctccccctgtggttccatatctggctctgtacagacctcttggatccccctttaagcttctctgctttgtccacccccttcagaacatgacctccctggaattgactgccttcatctctagtttcttcttcttcttccttgcttgccagggtaagctgagtctgcttgtgttcttgaccttgttggtttctgtcttgctcatcagaccctatattcttccccgcatccctgatgcactcttttctgatgtagtgtaatccctgttgtcacaggagaccggaatgcataggttatctgtgagccttttcatttgataaaatacctgtgaatgtgtgagaagaaaaagcagaaaaagtaagggcatgaaatgtctaaccatttgaaaaaacatggtgagccgtgggtttaatctctacacactgcaatgaaatttgtcctctaatgagaatatcagaaactagtttttttctcaaaaggtagaattatttgcatgtgaaatgggtgtgttttggaattggaagaggtttacttattcattagatctgaaaaccaaggaggatgtgatgaagctttccttttccgatggtgaagaagctgtttctcattttgcaccatctaaaggatatcctaccattggcccagtcgctttttgtcaccatattgccagtggatgcgcttggcaagactcagctgagaattttggcattttcatttttccttctggcttgatttttcatcagcctgcaattctggagttcatttccatggtatatttggaaaattcaaattggcaagtgataaacacagaatttcaccaactatccctttgaaggctttcagcatgatcagagatgcatcatgttggcccttgttcttcaggcccatgctcttctgggtcagcccattcacttattaggtctgtgatgccccaagaacttccagaccttgactctccagtcctgtgaatgcaaatcatggtcacttctccaagcctggtgctctggaagaggcaggaagaaatgcatgggttggggatctgtttatagatgggtatgcattttgtggatcctggtgttatttcttactgttcgtaggtatcacttacatgttaggcattttgtgggtaataaaaaatagcaaagcccagggaaataaaattcatattaatgactcatattttataactcagccttaggatgcttgggaataatcccacctgctccagctgcttgcttggggagctgtgaggccacagtggggcgtgctgctcagggtgctccacagatggacacctgagtttgaatcctgagtgtcccactttactagatggcaactggagacatgttatctgaatgtcttgagccttcgtttctccatttggaaatggggccttttatagcataggcccatggtaagcactgcatctgcattttttgttactctcctaagcttccacagatgtccaggcttatcacagagagctcagcatcctgggatcaaaagataaagtgacagtgtgacagggtttgcacattctgctcaggatcatctctccatgaaaatgaggaaaagagatgcaggtgcctacgtatgggaatgtttccatggaatattattgatatctccctttgaggataaaaagagctgtaaaaaggtcttctgactatgttcagttcaggttttgcatatgttttggtcttaaaaatgcaccatgtaaaatgattagagataactgtatactggtcagcccaaatactagagaaatatctctccaaagtctcttgaatgaaataaagtagtttcactgagccagtagtggctacacctctgacccattggggaagagtccccacttctgatctcacatccttgggagatatggtctgattcagtctgcactgggcctgttgctgttatggaaacgatatcagtgtgttttatgtgtgtgggctcatgcatgtgcacgtgtgtgtatgagggcattccataagagggctgagatgtaggtggagaagagcctactgcatatacaccctaactgtttggaattttcatgaggctaagtaccctgatgacctccctcataagaatgaattaatcaaacaaaactggttgcagcgtagccatgtcgtaaactgtagagaccattaccatcaccttcattgccagcaaagaacatgaatcctaatgaaatggatactcagtggaagcatccagtttgggaccaggagctggaaaatgaaaggaatgggtataagtgccacctctcttagtgcccggtaaatggaatcccttcatctgccttttaaaggctcaatataaatggtgctcatttcagttaagacctataggtgaactaaggagaatttggacagccagtttagaaattattctataatagtcaccatattttttattcaaaaatacatgtataccgcctaacattcttttttgatttgtggatttatttaaaaagtattacaaaggtataagaattacatcagatttagtaataatacatttaataaatcatgcttatggaaaggaataaaatttcatgagattgaatctgccccaagacaatatgggataaatggtactgacagtgcctgctccaagcagaacaaagagtacaggttgaacgtgtgagcgaaatagaaagggatttcttatgacctttattcagatgcccagcagtgattcccaccccaccccctgaattttctgagtatttgatactgtgattcccttctccttttgtggacagcacatagtaaatctgaatgtgttcagaagctggatgataggctacctatcatccatgtggagcctgtggagtacaagtccattaggtgtatgcagaacaacttcatgccagttcttgggaacttgacaagcagtcatccaaatatgatgctaacaaaatctaggtttccctctttttgaggctcaccagcagctctgtaagctttatgtacttttttcatcacagtctagaaggcgaaaaaatcgccagaaagtccaggttaactaaatagagcacccagtctgggatctccataacaaaaccgctggacaagatcccatgcaaaaattctttggaagtttcctcgaagatgctatagctatttttttcttgaagtggaccctctgaaaatatcgatcaagtcacttattttctagaactaaaaccatgactagctaggtggacgaaagagcttatttgctagctttcaaatagatgaaggggagaaggattgaaggctaatataaaattatctgtttaccttgcaattttgtcttaaaaatgagtttttcaggataaaaattaccttaaaaaacttatgacgtttcacatagtgtcaacaataataatacatagtcttcctaccttattgctgatggttctaataacatctgtattaccctagtgaatgtgttctttgtgaacttgcatgctctctcttcataaacctccctagtaggataactaccaagcaccagactgtgctgtctacccaccctccactttaactttggattatatgatacaaccaggatttgcagtcattcaaaagaaagatgatcttactctcatatagatggtcttttgtaatggcttgaaatagtgagaccctctgtcccattctccaaaaactgcctttttccattttatatgtgggagattaattttgaggtagtcttctcctcctttacaaaaacatctcttagcagtggttcctaaactgtggtgtgcgtaagaattcctggagtgcttgggaaaatattcgtgattctgccccctgaaattctgattggggagagatgcacttggaccccaggaatctgcatttaatgagaatttctaatgtaggtgatccttgtggatcacacttaaagaatctagagcttgaatcccttgattcaaatcctggctctgctacttttttgttgttgttgttatttcagtcaagttgcttaacctccttatgcctcaatttcctcatttgtgtaaatagtgtaataacatctcacagagcttttgggagaattaaattggttaatctagacaaagtgcttagaatgcactggattatgaactgctaggttaattcctgaattattaattgctgaattaattcttaattgctggattaattcctggattattaattgctcaataaatgttagctagatcaacccaacaaatcacagatgtcttgaaatagattgtttcaatcaggtttgtattctgttaatctgtcattcatatcagctgaggaatatatatcttgggttatgttggtgtgttaggatgggcaaggagtcatttaactggagcactgcaatgcattgtcattgcttgtaggataagaaccagactccttaacttggtctctaagcatctgctggtctggtcttacaccatcctcccagtcattctcactgtgatccattcacatttggcttctttcagattttcaaagatgccatgttgcctcctagcacacatgtgttttgtttgggtcactcttcccctcactctcaatttattaacttttactcttcctttagatcatggcttgatgtcactttctctgaaatgcttttcctgatctcactaagtgattatttgtgctaagagaacacagagttcatagctctgtttttatactccatatcacagttatgcttaatatttttgcctcctctattagagtctgcaggttgtaaggcagaaaccttgtcagtttgttgtatcactagcacaagtgcctggcatagatacttgctaaatatttgttgagaaaattattaaattttgattgaggaagacttggatggaatgatggttttggcataaactgaggatttggacagccttcaagaggatgggaaggcaaagggtgggtgtccccatggcagaggagactaggcaggacagttaagaggagatgttccagaaagatggtagagaaaacctgagccatccaccaccctgagggtgaatgttgtctgggcagagctgagaaagattgacagtgttggctttgggtgctgtacctgggtgagactttcttcctacacttagtggcataaagagacaaaatggaaagccaggattcatattcttgaaggtacaaatccaacatcaagaccaatgggcggccaggcgtcgtggctcccgcctgtaatcccagcactttgggaggccaaggtggatggatcacctgaggtcaggagtttgagaccagcctgtccaacatggtgaaaccccatctttaataaatatacaaaaattagccaggcatgatggcacatgcctgtaatctcagctactcaggaggctgaggcaggagaatcgcttgaacctgggaggaagaggttgcagtgagccgagatcacaccattgcactccagcaagactgtcaaaacaaaacaaaacaccagtgggctatagctgagcatttggagttggatggatatggggtttatactgagcttcatttaggaagaaaggaggctgagggcgactgttgctgtttagacagtggatgtgttgtagatggatagttcagcttggcttcaagaatcagaaacacacaaagagcaggtcccagtctcctcagaagcctcatctgggtcattacgggctgagggtcccaggcttgcagagacctttaaggaagagaaggttctccttgaggttgttatgatgccaaggcagatgacgatagggcagagagtaattcttttctctctaacataagcccaaatcggtgccttctgtgacacttaccattttccatcaatctctgtggaactgagggcttccgcagacccctgagtgagattgccaccttatgagccccctcgagtctgaccaggatgtgcagccattcactgctcagtggcgacccctgctgctaaggagagagatggcagcacattcagagttggtgacattaattctagtcatgcaacccggggaatttggagcaagcaggggaggagtctgaggggatgaaaatgggctgaggaaatccagggagatccctagtgttcagggcgccttgatgaggtgctaatgcagaaaagagctgggcctgaacactccgtacttacaaaatcttccacaagccgccagtgtaatcgcttcattccaaaggttggctaggaaccaccgcagtgccctctgaggaataccattgcaaactttaacttttatttgcggagctctcagggctgttaggcaacaaatatttttaaagatacccctctaattctctaggttaaaagttgcagtaattttaattaggggtagaggctgtttatgtttgtttacatcctgggtaggaattagagtataaatcctcccagtgggacccctgctgggatgctctggaatgcttgcattcctgagtatgtgagcacccctggtgtgcatgccttgtgtgtacatggcaaggtatcgcgaggtggttctatgacatttctggacaaaaactgtgtgtgaagagaaggtaggagaaagcaaactcacaatcaaataaaagtagagagaggggaagagatgagattgcagttgattatgggtctggcagcagatgttctgcacgaatccaactcgctgcagccagtctgtttctatggcaacagaatcggtaattattgagcccaggcactcccccacttctcccaacaaggtggaggctgatgaatatgaactatctccagcccatcaccagctttttctttttcttcttgtccttatttgttttttagttctttataagaaaaagtgggggatatattgagaagtaccaagacggggagctatgggtttattgacaaaagagcataggacactaaaatagaaacgaagttattatttttctcttgtgatactctaagagaaaagctcttcctggaaaagccgatgatctctgaagatgctaaataaatgagcaggagtttccctgaaatggaggcgccctttgattggctgatctttccccgactcctgccaatcggagcatccctgggctccagctccataaacataagcaaagctacatgcttattcttctggacttggagtgtataccatttaaaggtgtgcggcgggtctctgttcacatggctcaactggaaacctgtttcatgaacaagcttactcaggaaccatctggtggtattccagcacattgttcttcagggggacgactctaagtcgctttgtggtggcagcagcttagaatcagtatttgtggttgggaaagatggacttacgggagcttggtgagtaaacctccgtctcacacatgtgtccaccggtattatcagcctgagctaaatgtagctttgtcctattgtctgccgagaaaactgaattggaacaagcacatggaggagcgggcattcaagggttcccatgatgtaggagactctgaattcaaaagactgcatgctttgcttgggtctgatccgatttgtagctgactgtacattatacttggacattggttgtcttgttaggattagtgtaaggagcagagttctgctttatttccctgggtgttgatgcatttcaagagaaaatgcttttaaagctacattaataataagagtcaaccctgtgtattgctaggaagagagaaaaaggtgcaggcacggagcccggagccgcttgattgtgttgctggtgtttgcattgtgaagagagatgttattacaatggtctgtcaaacacttcttcagacccccagccacggaatgaagcatctcttctccgtgtgccactgttctctgcttggaaaatgtgtaactgagctaggtcatgtcctttccttttatgaaacctgtctccaaattgaaatatgttttttaattaattgcaaagataaagtgaagtgcaattggaaagattttagcagtcaaaaagcatgcttcaaaatgactctattttgcatcctttcaaacccctgaaaaaccagagagggtttgcaaagttatattcaaggattggctctctgccaggaaagggatgctctgagctattgctctgctccctggggtttaattttctgacactggtgatgaaattttcaatttcgttgggtagaaacaggaagaacaagaaagcagtactataaacaggcaatggaggggcagcgtggggaacgagaaactctttgcctgtagggacccttctagctgcaaacttaaaaatgtatgtggcaagatgcaacccaagcaccgagcaggattccagacgagttataatcattctgaacggggagaggaaaggtaatgccattggcttgggttgcagagagtgggggctgaagttggggcttctatctctgcctaagatcttttcccctgattgtctcctgattttgaggattcatcatgttactttttttaaaatgtgatttcctgtcttatgtgcctgaaagtgtcatagcacacttgatgtcttctatttacagtccacttgacttcaaataatggagagaggaaaagagaatgaagcatctggtttatgaagaaatgcacatgaaatagtcaaacaagagaaatcttattggttgtcctttttaaaaaatgtccttttgcacaggagaatgctgtgggtcttcacgtggctctagaatagaatttactttatcctaaatgggacctgtgatgaatggttacagaaacagaagagctagaaagctttcgcctatagaagactcaaggcagggtgagggcgactgggtgtctgggagagaccttctactctgtctattaaagaagtagggctgacgttgcaggagagggagaatttcctaactgcgggtgacaatgcatcagggacacctggtcacttgacaaggtcagtgacctgtttgttagctgaatgcctttctggagatgtaggctgctctctgatcccatgaggctccagatggctggatacattgagaattctgcctgactggaagagcttgtgtgcatgttaactctgcctgctgcaccacactcctcagtacacctcgatgctcgattttgaggaagtctggtttctagaggatgtgcattaagtgacagtcagctcgttagagtcaatgtccatttcgccttggcctcttctctcccccactagtgtcactttacatgagcgaagtgctggcacctgttggtaagaatgagagaagaaaccagctttttatggaagcagtaaaaaatgtttacaaaaaaaaaaaaaaaatctaaaacagtagttcttaagctattattggatcatggaactctttaagaatgtgaaagctatgaacctcctctctgctccccccacctaaaaacgcattcatgcacaaacacataacactttgataatcaggcattttagggtaaagcaagatccctgtcctgggggaatagccaagaacgtatcataccctgaagttcattgtctccttcttttcagatgggtccgctaaatgctgcagccccatctcaatctgtcctgagcatttactgtgtgccaggcactgctcaatacattttatatgtagatataataattcattgaatcttccagcagccctaatgggactaagtttttttgcctgttttagatgaggaaatttagtcgccaaaatattaaggaccttgccggtgtttatccagctaggaactgacaagtgtttggtgtttcatgcatgtcgatgtacttgttgctgcattcatatgtggaaggagagtgagtatataggggaagatggtttcatcagcctgtcagtctgtcaagtggagtcagaccacaggtagttgaattaaacaatcaccacaataattaaagtcaaattgaaaaggcattttggggtggttgggtgaattattaataacgccatttgggaagtttgagctaagtaaaaagcccatcacaaaatgccccattggttgcccctttatgttactgtgtgatgcaccatctcattcctgtagcatttatttgcctggtatgatttgggtcaatttacctaggagaccagttccttctgggccatctgggagaggtgacaggtcaccagtgtcccatggctgccctttgcttacatttgccaggaatgatttgcagtggccaaagcaatggcgagggtgatgaacaactaggaacaaccaggcagccagtttgggggttcccatgaactgcaatggctgtaggaatcaccaggactaccatgctttctcaagaccttgtgagcaggggaggcgggcccagctcagaaatagaaactgtgttcgtcagagtttgagggaggattgatggctgctagggcaatgtggagctggatgggtgtgtgaatcctccactcctggttcagccactgcatctccccttctatctgttttataaatggattcacaatgaagatgtaacaataaaaaagagaaagaaggggttaggctgctagaaggaagaataaaagctattcatcttatctagatgtcttatctgacataaaaaaataagcaagattgcaatgctaagtggaaaggaatctgtaggggtcatggtaacaggtttttaaacatgggttcttggctatgcttgcctagtattatgcactttctagtattatacgaggtatgtaaatgtgtagaagacattttaacaagactacaaaaaatgtactacagggacaatatagcagatctcattttacattgatgctgtccaatggaaatatgatgcaagttaagtatgtgattttaatttttctagtagttcacctgaaaaaagtaaaaagaaacaggccagttaattttaatgatatgtattattttacctgctatgtctaagttattatttcaacatgtatctacaaaactattaacaaaatatttacattgaatttttcatgttaagtctttgaaatatgacatgtgttttacatttacaacacaactcaatttggatactggattttcacaggaaatctgtatttagatctcataaaattcatagttaaaaaagtagattcatgtgcacaagttgttccaaacatacatcaaagttttccaataaataactgaattgagtattggtttttaaatttaaatgagctaaaattaaataaaatttacaattcagctgcacagtcacactcaccacactcactcaccaaggcttccctagccaccgtgtttagtggctactctactggatggtgtggcactaggatctcagaacattccttgcacactaggccagtaacttctctcactccatcatcataccacagcacctttatctcttttacctccacaaggtacctggaccacctgctctggtaacagagaaacagaatgttagtattcacaaacatgttaacttttactttcaccgttgctcatggtgaactcaagatggacagctaaatcttagtttctccattacactgtttggcaagggggaattaaaacagtatgctgtttcctcttgcagaaagtcggcactcatccatctgtggcatttctttcttcatccttacttatcttggccctgctatttactgtgctctctggcccctctctcaactcagtatggaacgtgggtttaattttaattataaacaaaccataactgagaaggtaactctgttacaagcagataattcttcatgaagacaagtataaattcaggctaaggagtgatttaattgctatcatcttattcaattctacaaattttgtttagcgagaaaatattgactaaatagttctttcagttaatttggtcttcaaatccgtgccttcaataccagatattatcctatatcttcactccccaaaagatttattttaatgtaaaactcaccatgaaaaagtaatcagtctcttcaataactagatcaaaaccatcctgcaaagccttcctagaggcatctagtcttagtctcctaatgatgtccccagttgatgatttcacccaaatcaaacgggtgaaatgagtgagctttggaaaagtttaagaggactgagcttagagtgagctttggcctccatttgccaaagctcactctaagctcagtcctcttaaactttcccttagctctattaagaattctgcaaaacagtaagaaaaaaaaaatccatgtgattaaataccatctttcctatcaggaatgccttctgacccagtggtccccatttcctgcattttggacagaattcccaagaatgccttgtgaatgttggttggagtaaattgtgtgggtcctttacaacttctttcttttgataatattacttaacattttgtagtgaagcaacactggtggaacaaatagattaaaccataggcagggttggatctcagagcaagatgaattgctttgtgtatctgctgattttcagccaagccaaggcctaatactctcagtcatgaatggaaattagtgatttgggatttcagtgagtgcagagatgctgggaaatagctgaacatcacatacgtaaaattatcattacaataagtatctttggattaccacaggatttggaagtctactaatttgctagctcatttcaagcaatctatgatattctagaaatacaggactagaaaattattcatatgatgatgagcagtaatctagaatccaatgctttaaagtgtggtttctagcttagcatctaagttttgcaagttatttaacctttgtgcttctcagcaactttacatgggtaaactgaagtttagacttggtgacttcctatgtcatatatgcgtcaaacttctgaactatctatccgtctgtcttctggcgcccatgttccattgaaaataacggtctttccaggtgtatccagatcgagcttcagaatccttcttaacacagcactaagtcaaccgctagtgagatatcagaattgtcttacagctgaaactgatttttcatccctctcttatgtccttgcctcagctcagtgccttgtgcaagactttgaaaagaagcatacagggaattatcatcagtatgcagggttttggtgataaggcagacagctctttactcatcctcttgctcagctgttccgtggaggtgttgccatctgacaaggagggctgcagccttgcgctttgggagctaacttctcttttcctttgagctgtaagtgatgagagacctgtcaaggagagctgttcactggcatcattcccagacctggaagtataatgaaataaagtttctttccaacttggttggaattcttgcagctgaatatttaagatagcatctggggcagttctgacgtccacttgcctggttggaaagaaacacccatgagctaatggaactcaggccttcacactggtagcccaagtcagggctgctctgggcaactcagttctaactagagtcatctaggccacaggtcccagcaggtgagatggagccccctccttgcctaatgagccagcaatttgaagtccgcatttcagaaactttgtcatatacaaagagggatatcaaagcaggagctggtttgaaaaccaccaacattggcactgtccctagacctagactacttaatgctaaaggttccagggcactctttctagtaccatgagggtagtagcagagccacaccttttagctttagagattgatgggggacaagggatgacagccgcgtcctagattccctgagccagcgtcaaatatctgggcaaagtaggcgtaagaagctttgcaaagaccaccttatgagccatgcttctgtcccctctaaaattttctgagaactgggtagagggactccttaatctctgtgaaccttagcttcctcatctgtagaaagggaagaaggtacatttcccatgaggctgttaacaaatgaaaatataaatgatgtatgtgtgagtgattagtaaattataatatgtatgggaggggaaaatagtctgattccatcccttgggtagaagccatttatttttcatgtctcacagaatgtctagttctgctcttttgccatggaagtttctctctactttcagattattctcctaaataatcctcaggcactaccccaaccctctagcattaaaggccacccagagagaaaggcactacacttacaagccagggcctgggtcaagtttcagcatagccaccaagtaagatttaggtttcgccatgttgccccttcaatctttagtattttttctcctggataaaaatatagatcttattgactctacctggtacatagaaatgtttagagagcacatttattaatatatcccatgtactctgtggattgtaaaataagggcttactattatgcttcaaatctaatatctcctaacaactcatccttgtttattgaggaggaataattggaaacctatttctagggtagcaaaagctccagaatgtggagctacagtgatgtgtatgtagtttcctggttttggaagccagtcaacatcaaatgatattgtgcttctagggagatgcctggcggcattcaagaaggctgtgacctgccataaataatcggtggcttttacatttgtaagtcaagatgttcttggtctcagcagatggcccataaatctttctggatagctgagctttagccatcctaccccaactctttcttcttcttgaaggcataatgaaagctttgagaaacatgtacatttttggttctttcacatgcaggttcccagccacttcttgatgactttcttctccacaccccctgcactcccgccggccatgcacttcatacccatgatgtattctgtcaagagaggagaaggggtgatttctttctctgtcacatctggacatctatttactgtgaacttatagcatcctagatcttgaagtaacctgagtcctaggatgtcagatagatttcatctggtgacaacttaggtcccctggtgtggcttcctggggctctacctctgggctccatgagccaacagggagtgaggggagggtagtagcatgcagttaccttattacaggtaaagaaagtgaggttcagaaacattcattgacttgctaatatccactgttaacaagagacaaagttcacattttcttgctcaatttattcaacaatcaatgtttgctgaatgccaaccctgtatcaggtactgttctaggccttgggattcccagctgtgagtatatatggattaacctgcatggagatttatttttcaggcaatcattagcctcagagttggaattccccagaatatggaagctacaataagaaaaaaattcaacaaaccacatttatttatgtattcactaagtcatctgtgtattcacctatgcattcatttccatgcctgtttacctgacgaaaatttatccactttcaaaaactgggcccttgtaagagttgtttgaaaactacttgaaagtaatcggtgaaaacaaattgtccaacagctatctttgccttccgccctccttcccctctaaacacctaagagaaactgaactgtaaaaacaaattcaagaggtgtagctatcctagtttcacaaagcaacctccaaggagaaacctgggcggaccaaattttttctactttatcaaaagtttctgaactgttagaaccgttaaggagaaagaatttgcaactaaagtgatctagaactgttgcaattccatgtgacttgggtagaagtataaatggcaatggatatgaaagtctcttatccccaaatttgaacactgtaggtaaatatacaataatcctatccactgtgtgtggtgatctgtctctgtctacaactctgactccccattacttgcttcaaggccagaccaatgtcagaaacacttgcactgatggttttaagagctgtactctctgtgtgccaggcattttgcatattcctttaatgggatttcttaaacctttttaaaaattttcagtgtagtgatcattttaaaattaccacatggcatgctctgtcaagcaacaagttttatggaagagtacatcctcctatgctcaaaggatagagggccagactcagggagactccaattctcagtctctgtccttttcctaacagtttcagtagcgtgctaaaagcagtgttaaaaggcattttatccccttttatagataaggaaacagacacaaagagagttagcttattatccggttagtaagtggcagagtgaagttcaaatccaagtgtgtcttgattcccaagcccacgtttttactgaggtcaggtgcctccatttcaacaccaactgtaggtagatctatagctaatacactggaaaagtaatcttcaacctgggtgctcattctcctgaatggtgtgaagacttttcaagggaaaggaaggcatggataattagccttacaataatccattttcagattctcagcttccacacgtacattaaaactgatcatcttgcaactgcacctgtggctttcacaccaacttttcccaaccactgttctccctcttgataaaagaaaggcccctgctcacctccatcaggtcttactatgatgtgttgctcaaagtatataaaccttctctgagagccaaacaaaaggacttgtgacttatcttttaaataaggaaccataagtgggtccctgtcacgttaagagatgcgttcccaatgggatacttctcttgggtttggaaattatgtatcaaaatttgtaataaagtctcgttttaattagtttatactaataataattatgctgttaagctcaatcgagaagaaaagttttattagcaccttctgttcacaggaagtattttttaagttagatttcagtgtgtatgtacgtgtttttgtttcagagaagtatgataggatgataataaaagacttttaagcataaaattccattatgataaaattctgtatgagtagaattgaggtagagtggggaaaatgggaagtaaaatgggagttttggttctaggtcaggcattagtggatgatggcctgtgggccaaatatggcccactccctggacttgtaaatacattttattgggacacatctgtgcccatttttctgtgtagtgtctgtggcttccttcatactacagtggcacagttaagtagctgtgacagagactacctagaaagcctaaaatatttagtatttcggcttttacataaatcctattgacccctattcaaggaggaaaatattgataacaatttccaactattcgagaagagattattcgtgtatttttgagtcatatggatctcaaatcactattgtatgtacattcaactatatattgaaaagatgacatacaattttatcttttttttttttttttttcaggcaagtgtcactctgttgcccaggctggagtgcaggggtacgatctcggctcactgcaacctctgcctcctgggttcaagcaattctcctgccttagcctcccaagtagctgggattacaggcatgcaccaccacgcccggctaatttttctatttttagtagagacgcggtttcaccatgttggtcaggttgctcttgaactcctaacctcaggtgatccacccgcctcggcctcccaaagtgctgggattatagacatgagccatggctcccagccagttttatcttttaaatgtcaatattgtagtacactgaaaattatattctttgaaactatttcaactttgatgaaaattttctgttttgttttatttttgagacttgctctgtcacccaggctgcagtgcagtggtgcgatctcagctcactgcaacctccgcctcccaggttcaagcaattctcctgtctcaaccacccaagtagctgggattacaggcatgtgtcaccatgcctggctaatatttgtatttttttaatagagacagggtttcaccatgttgcccaggctggcctcgaactcctgacgtcaagtgatctgcctaccttggcctcccaaagtgctgggattacaggtgttagccaccatgcctggcctgatgaaaaatttcatctgttgacttaaaaatgtctgagcgatacatatagtttttaaaatagggagtggggaaatcactgctgtgtccggaattggtgggttcttggtcttactgacttcaagaatgaagccgtggaccttcgcagtgagtgtcacatctcttaaggtggcgcgtctggagtttgttccttctgatgttcagatgtgttcagagtttcttccttctggtgggttcatggtctcgctggctcaggagtgaagttgcagacgttcgcagtgagtgttacagctcttaaggtggcgcttctggagttgttcattcttcccggtgggctcatggtctcgctggcttcaggagtgaagctgcagaccttcgcggtgagtgttacagctcataaaagcagtgtggacctaaagagtgagcagtagcaagacttattgcaaagagcgaaagaacaaagcttccccagtgtggaaggggacccgagcgggttgccactgctggctcgggcagcctgcttttattctcttatctggccccacccatgtcctgctgattggtagagccgagtggtctgttttgacagggcgctgattggtgcgtttacaatccctgagctagatacaaaggtcctccacctccccaccagattagctagatacagagtgtggacacaaaggttctccaaggccccaccagagtagctagatacagagtgtcgattggtgcattcacaaaccctgagctagacacagggtgctgattggtgtgcttacaaaccttgagctagatacagagtgccgattggtgtatttacaatccctgagctagacataaaggttctccacatccccaccacagcagctagatacagagtgtcgattggtgcactcacaaaccttgagctaaacacagggtgctgattggtgtatttaccatccctgagctagacataaaggttctccacatccccaccagactcaggagcccagctggcttcacccagtggataccacaccggggctgcaggtggagctgcctgccagtcctgcgctgtgcgcccacactcctcagcccttgggtggtcgatgggactgggcgcagtggaacagggggcggcgctcatcagggaggctccagacgcacaggagcccacggagtgggggggaggctcaggcatggcgggctgcaggtcccgagccctgccccgcgggaaggcagctaaggcccagtgagaaattgagctcagcgccggtgggctggcactgctgggggacccagtacaccctctgcagccgctggcccgggtgctaagcccctcattgctcggcaacggcagggccggctgctccgagtgcgggccgccaagaccacgcccatctggaactccagctggctcgcaagcgccgcgcgcagccccggttcccgctcgcgcctctccctccacacctccctgcaagccgagggagctgtctccggccttggccagcccagaaacgggctcccacactgcagcggtgggctgaagggcttctcaagtgccgccaaagtgggagcccaggcagaggagtcaccgagagcgagcgagggctgtgaggactgccagcacgctgtcacctctcactgccttagaagacaggatcatgaatgtggcttccatagttcaagaccatcctaatgatggactggaacttgtttccttctcatggagcaaattgaggcctatgtgggcatctcagccctcactcagtctattgctctgcaacttagatggtagctgatagagacatagggccctaatgggacattgttaaaacacagtctcctaaatgtcaggcctcagttatatagatcagaaaaattttccctgtactggcactactgattagccagctaggggagaaaaagaacagcagtctcgctccaggaggcagaaggctggcctttatcctgatgtacctgtaggatggatgggagcctgcaccatgctctggcttcacggattgggttgtaccactcaagtggacatttaagcctgcttagaaaccttgatgcatgttatagtttgaaatatgtcctcctcaaaaatatataccagagtcctggcctggcatgggtggcttacgcctgtaatcccagcactttgggaggccgaggtaggtagatcacctgaggtcagtagttcgagaccagcctggtcaacatggcaaaacctcgtctccactaaaaatacaaaaattagctgggtgtggtggtgggcgcctgtaatcccagctgctcaggaggctgaggcaggagaatcgcttgaaactgggaggtagaagttgcagtgagccgagatcgcgccattgtactccatccagcctaggcaacaagaatgaaactctgtttcaaaaaactatagatatagatatagttatatagatatatagattgaagtcctaacctccgaaagttcccttatttggagatagggtcttacagaggtaatcaagttaaaatgaggacatcagatggaccctaatccagtgtgactagtgtccttataaaaagggaacactggatgcagagacagacatgcatagaaggaagatgatgtaaagagacacagggaggagacagtcatctacaggccaaggagaaaggcctggaacagagccccttacagccttcaagaggaaccgaccctgctgatgcagacttccagcctccagaactgtgagacaatgaatttctgttgtttaaaccacccagtgtgccatacttcgtcatggcagtcctagcaaactgatagagtgcactcaaaagcacagattcttttcatggactttccaaagcccagggacttctgtttcttctagctgtgttttgaaattgcgacatggcatgggtcatcaggatacgagttgttatctccttcccgtaagagcaattaaggtcaaagactgaagccagagctcttgggtttaagtcccattagctgtgtgacctctggccctaatggtgtctcttgtaaaatagaataataatacctgcttcttagattacttggaggaccaagtgaattaataacatgtaaaactcttggtgctcggcacataataagtgctcgacaatgaaacgttcattgccattgttggggggccagaaagcaaccactgcctgagagcaccccagacccatgaatcacacagcaagaaagaaagcccgcatggtcccctggaattctagaagttttatttgtgaaattaccttacaaatgttagagaggtttaaaaaaaatctctgcttgtcttttctcttgttttatcctgtcttattcttggaaaagttaatatttgagaatagctagcatgtcctattaatcccttttttagaaaaggacccgctccgacaccagttggcagttaggtttcatcagtcactcgagattatggattaactcactgatctttttaccctttgagctaattagcctctggacaaataccgctagtcacagaggccaagcacagctgaccaaacacatttcaaagagtaaatttagtgagtaaataacgccaggcttagatctcttggtaatactgcttttctgaatcagtggaatctggatgatctttccttcccagggagagatggaagtgtaatgtttacaacccttcaaaccaacagaaaaaaatgtaacgaattaagtcagctacttcctcccttgactcctcctgttcccccatttaaaatgatttcttttcttatgtcttcaaataacaagctcagtttgactttaaatgacttaagtgtatcctttgggatggttgtttaatagacctctttcaaagggaggcttccctgtatgcccagctgaaacataatttttctcaatttaatttaattatcaccacctgccaaaactttctctcgcctccacaaagcaccttgaacagttcatgcctcaccttggtggtaaggcctgttaagtacttgtagataattatcctcttaatgtttggtgaaactcagtgtttctagacctttcgttctttgctaaagaagacttctccaggtagtcctttccaagctcccttcaagttgtaatgattcatacacacaacttcaccagtgaggcctccatacctgggtttccacagttgcagggagaacatctcccaagggtgggcccatctccttggcaatggcagtgaggatggtgtgtcattctgatgtccagctctgtcaggtaccaggtagctggaatggcaaggctcctggcctctcccctcatgtctccctcatgtgagcagccttatcctgtgcgtcgatgttcttctgaatgccatgttttttcctaatcccactctggagaatcaggagtttcagactgagtggccagctctgacattgcacaaccacatacctaagtaactcaggttttgtgttttgttcttgcattgaggaaaagagaagacaggaagctattgtgctcttatttcagaagagtggtaaaagtgtggtcattttgtcacttgtcaccagtattcagtgattcaacaaaacctttatcaagtgtatactacatgcctagtaatgtgccagggacatggaaggaattcaaaaagaatacaatccagcttttgctctcagggatcttagaaaacagtgaaaagcttataagattgtaagcaacattagctagttaaccacagagtgggaagcctccagtggactaagttgcagtccactgttttgtggctaccacatttagaaaaagcacactccacactggcatggttttcccaaccaggttatcatgtctgctgctcagctgcatctggataaattgtgtaatatgattttattgtatagaatgccgtgcatgtgtgtgtattggacagaggaagattaccaagaaataattcatggaacaaagaaggtattaggacagcattcagcatatgatccttggtgtgcgtgtgtgtgtgtgtgtgtgtgtgtgtgtgtgtgtgtgtgttaagtgtatgaatgtatttgtgtgtgtgtttgtgtgtgtgtttacatatataaggagagcctgaaaaatgaatacaatgctatcaagagtggataatgatggagaatgagactggagaatccagaagaagagttttatttttagtatagtattctttagtacatatttttactatcggtatagtttgacttttataataattttatttaaccatcaaagtaaattcttgaaaaatagaaatcttgttaaaatattaataaaaataaaaccccttacaataatatgaacaacagggaagcgactaaaggggttcataaagggaatgttttactcttgactttaattattaaagaaatatgatttatttagagtttgttttggaaatatttaaagcagtgattttcatcctttactagatgtagccaccttttgagtcttttaaaaattaagacccagccccaggatcatcccagactttctaagccagaatttcaagtgaggcttaagcaagtgtgtttttaaacagcacacacacctcctaccccacacccccaccacatactacacacatataccaccaccagcagcttcctcaatcaattctgatgtgcaccaacttaaggcataaaactagggaagtgatgcaagtggggggaagcaattgtggctgtaaacatactgagttaaacttcctgtgaaatgacacagatcttaaattgggttgaaaaacaatatacaatatcatgaatattgaattcaccacatatcattatcacccaaatatgagaaaaagctagaaatgcaagaagaaatgaataaaaatatagctggactgacattcattacactattactctagtatgttaaaatataatctatagaatacttcaataatataattaatgtgtcaactaataggtacatattgaattgatacctttaaatatagctgtgatggcatgtctttacatggtaactgtattatgttaaaatataatatatagaatactttaataatataattaacatgtcaactactaggtaggtacatactgaattgataccctccactgagagtatgccttatttttcagtatccatgcaactttttcaaaaatgcatcacttacatggctaaagatcctcaataaattctcaaaggcttttaaataaccactgaaccaaagaggaaatctaaactactactaaagattacaaaaatgatgacagtgagaacatcacatgccaaaacttatgggatatagccaaagctgccctcaaatagtatatttgtagccccaaaattattttttttaattatttatatagaaagaatgaaaacaagtgaactcaggatataactcattttagaaaataacaacaaaagcacccaaagaatacaaaaggaaagataatgcaaggcaataaactagaaaataaaagaaataatagaatcaataaatgaatctaagaactatttctgttaaggcaattatttaatagaaataattgacaattgacattgacaatctatcaaataaaatgtagagaaaatgtaagaattaacaaaatttaattgaaaatgacatagagacatagagctgattaaaatattattaatgaatttaatgggtggcaatatgccagtgtgctttacaaagctcaattagtacacccagacacgcatgcctgcacaaacaaaataactatgggctatctgtgaataatatatttgggataaaatatatacattgctcataaagcaaagtgtcatactttgccagttgaagtatagattagtacagtctttctgaaaatggcaatatatattaagaacttaaaattttctgtgatatttatccttctattccaagtcaaagactttatcctaagaaaatcagaagtgcagaataaatattctttgatattttaagagagactttaggaagactcatgtcattggagtgagctgatgatattaatggttgtggggagaaataaaaccaatagaatgatttcatctagaaaaaaaagcatggaattataaacttaaaaataattctggaagactctgcaccacaatgttaacactcattattgcagtgtaaggattacaagtgatttttaacttcttccttttatttttatatttctttctaatattactcaattggaaggtaatatttctataattagataataaacttactaaaacaaaaatttaatataaacataatggaagggttataataacaggcaaagcacatacaaaaatcatgcctgcataatatattgagactgaggatgccaccaaatcctgatgttccctggttagtttgtttactttccatttccctgaaaggggcatgaatgagaggtggagggagaagatattagctaggttgcattctctttccaaagcctgaattcttttttatttcgtgtttccatcactgggtcttttatcattaatctctaagatgtcagctgttcatcaccaggtgcctgaatccctaccagaaactcctattggtgttacctatccagggacacggatttctcttgctctttcctttctctgtcctttctctccctgaatctgagctgctttctggaagtggtcagcagcaccctccctttgccagaagtgcaaagtttggccaacactccccctagtggcaatttaacagactcctgaactgaccaacccaaaagccaaggacgagcactgatgccacgctgggttagctggggcacttgttaattaaagacatatcactgggccctacctcaggagtgtggcccagaaataggtattcttttttaacaagcatctcaagcatgggtttttgtcccatttgtacccttcctttgtcatttttatggaatacatagtgattgggattcagttttttatagaaacttgattccaatttttagtactgaatgtgaaaaaaaacattcaagcttcaaatcgattggcctagagcatgtatttcttatattttagagaagaggcaataggataagagagaagctcttgtaaactaaatatacatttctaaaaagaatagagaccagaggcgtttgttataatgtcctccagtgaacacttgtgaaaagactagctgctactttattctacctgcagctatgtcagtgtataaattacaaccaagcacgttataccttggcactgttgctttcttattctccatgtctatttctaaacatcccctatacgtgaaatttgttctccagtggccagcgagccagcctctttggagcagcctgctgatttaatcaacatgctgcttatcatgttttccagatggttaatgcatctcttaaataaaactggccctaatttgaactggtgtttctattctggtcctttctgaagaacaatttgtcttatggtcaaagtttctttttcattatttctctgtaggctctggtgatgtctttttaccacttctttgtttaaaactgccaagtggcacattcattcaattcattgatgctaatcatacatggaggaaaaagaagacagttcatattaatatcaacacattcctcaaatcatttatcacttacacgtaaagttgtagagaacagatttgtcagaattattgattgagaaaggaaagagccctttgttgtggaaccgtagattggtgttttctcttcattgctgcttctgcttcgagaaggagtataaccttgtcacgtgaaacagcattatttggggagcagtagatacaggccaagtttttaggagtctcagttaaaaacccgtggtcttaatattcagtgttacacaaaggattccaaatataaataaccttcacgctgacccatagattcaggtctgattcccatttcacaaatgggaatacggccaaggtatacagttaggtcatataaaagtgacattaaactcatattggcagaattccattgtggtgtgacttctgcaataatgaatggctgaaagtaggcaagataatgtaagacttgaatggggttgcattctgaaaggaaggcagccagaggtcctcagaattaaatggaggacctgcagtaaaaatatggctctattacaccaagcattttcctcttttcctttccattgcctgtctgagatgatttggcagagtttaaaaataaatgaagtatattcatttttccttcagagtttttctttgaaggcatttggtaaggggacaaaatgaaatatgaacacaggcaggatgggggatcaagacatcaaaatgttagcattatatccaacatatatatccttatgtgaggaggtatgcttgcttccaattaagatgacatcatacaggcggatgtgatgcttccaagcagtgttaatgatctgctaggtaatgcagaggaaatgatgtgtttggaatgggtttttttttcccatttgtacctttccacttctttatggactgcaacatgtaatgattgggattaggttttttatagaaacttgatttcaattttcagtactgattagagacaggattcttttgcaggcatatcagttatgttgatcattgcttttcacattttattgtagctgccaaatccttattataaacagagtagaaccctacatataaaacccacaaaagggcaactctgagggaaaccaggttgagcatctcggcaattccccttactgagccattttctccagtgcctccctctcttctcccatagctgagtccgaaaacaatcttctgggagaaaggataaggtttcttctgtataacctaggggaaaagtgcctttaattattcattcattctctgctggaacaaatatttattcggtgcctatgataagccaggccctccctcttctagacactgggctgcagtagtgaggaggaaagacaaggggactgtcctcagggaggcagcgggggaggcagccaggccaccccagccatgatgccatgaatacattaagaatggggagaaacggatcttagggagagaactcatggggaaaggatggttgggtaaggcctgtggaagaaaccaggatgctgaggaagagtggccacatcaagtgcttgggaaaaagtgtttcaggccaggaaagctcctgaaatcccagagacagaggtattcaaggaatgggaagatggccagagcccatcctggatgggggatgcggggggtgatagtggccaagaggtcagagggaagcaaggccagttggagaacttgtactaggctgtgatggaaactcagtatttttcattttaagtttgcttttaaccttggtttaattgtttattattaaacatcttatgactaagctgtttatatttgtattccttcgacttccaaaatggctttgtggtaactcacgtatgcgttgtgtatgcgcaggttcatttggttcataaaagctctagaccatgtggaggaggaaggaagtaggttaactgtagggtattgtagtgggattgagaattttaaaagccagagtagaaaaaacaaaaaaagaaaagaatgccttacataattctaattagttaaaaaaaggaaggcccttcattcttaaggaaagaaacatctactactaaattctaaacctaatgtacagacttaagtttccaaattacaatggttccacttaagattttcaactttatgatgatgtgagagcgacacacattcagtggaaaccatactttgagtactcatacaaccattctggtttttactttcagtatagtatttaataaattacatgaaatacttaaccctttattataaaatatactttacgttagatgattttgcttacctgtaggctaatgtaggtgttctgagcatgtttaaggtaggctatgctaagctatgatgttcagcattacgtgaattttcaacttaaaatattttccacttacgatgggattattgggacataatctcattataagtcaaggaatatttgtatttcactgagtcatatacaataattcatcaacaattctctttatgaatattaaatgccaaatatacaaaaactattggcactctagggagtgcaagccttaatcagacataaattctgccttcctggatctttcaatttaataggatatataaagaacctacacaaataactgtactacaagacagcagatacaaatattagttttcatgggatctaaaggtaggttatctaattgctttctgtcaatttcagatatcacattaaagcatgactctgggacagttccaggtgaggggaaagagttaaagtaaccagtcaggtttatagcttttctgtaatcaaggacttaacacacagtacccaggggcagggcagaagggcaggttatttaagatgtccttcaaagttgactctctcaggagtctgggacacaggtgttctgcataactaactgaagacacattgggtatagacatataggtgacaaatcaacactgttacgaaatttcagtggtgctttttgttcctattaagacatatgttttatatagaactaattcaatcttacaggtgaaaatcagagaaactaggcatcctaaaaggaaaaatgcctctaatccatccacccgaagaaaaactgcaggtattttggtatttatctcttagacatttttctgtgtttgtgtgaggggagtatcacactatcccaacttttctgtggtcccttttcctcacttcttttcacatcaagacatgcagttcaaagatgcctttatttatttatttttttatttatttatttatttatttatttgagatggagtcttgcactgtcaccaggctggagtgcagtggcgcaatctcggctcactgcaacctcttcctcccaggttcaagtgattctcctgcctcagtctcctgaatagctaggagtacaggcgcacggcaccacgcccagctaatttttgtatttttagtagagacagggtttcactgtgttggccaggatggtctcgatgacctcgtgatctgcccacctcggcctcccaaagtgctgggattacaggcgtgagccaccacgcccagctcaaagatgccattactaattactacatgacactcaagtgtaactctatcaggatttatttaaccagtcttctagagttgacacataggttgttctcagttgtacgctattagaaataatactgcgtgaacattctttaaaatacatcttttctcacttttccaattttctcacttttccaattttccgtaatacttttccaattttctttaatacttttctaatagtggggagaacagtgatttgtgattctatgtctcactgagtcacacacatacccaaagcttttatttaagatctttgtttattgatgctaactgcagacaatgctaagctttcctttttgcagaaggaaggaggacttcaaagcacctaaggagctcatgaattttagatttcctttgttgtgcttttcttcccacccccaccccacccccgttaattcccttagatgcataactcaagccagagcttggaaggagctttcacctccttctgtttactcaacacctaccacatccaattagtcaccaaactctacattcttcctcctgaaaaatgccctgactctcatgcttaccttcttcccacatcattcatctttccctggtatttttctgtagtgacccagggtcactacaggaacttcttcagtgctctccgcttcttgggtttggctcccacgctaacccatcttccatacttcattttcatgtcaatctcatgatgcattcccctgcctcaaagtttttaatcggtccaaattgttttctagatacacttcaaactcctcagctggacatactggcctttgtttctggatcaagtcacctaggctgaggcctgagaatcagtattctttaaacttcccctgtgatttcagttcaagcagcttggctcttcaggggcccccaaaatgggcactgtggaaatactggtctgcttggaaccaacactaggtcaccaggccagttagagctggaaacttccctaagctacagccaaaaattttctagtacagtgtggttattttaggaataatttaaagagcatttcaccaaagagcagcatttttgcaagtatagattaaaagatcatttccatttaggaagcctaatttaattaagtcacacaatttttgaggtatgaaggcttttcttgctgagtcaggattttttgcttctctgctaatgcaaagcaggtagttgaaactgaagatttgctctgggacaatactatttacatgcctggccacattaaaggtcagggtagaaagtactgttctgtgggacagaggggcaagagggtattttgtttcaatcttattagagcactatgttaaactgtttttttcaagtagaatgtttaaattttaggttctttatgaaaaaatgcttaaaagctatttaatgatttgtgtttcttataggcaaggtattcataaatatcaaaccattaagaaaaagaaaaagatttttgagcagttagatgtttccattcaattaatggtgaggttttcagaaaaagtacttttgtgaaactgaaaaggatattgcaataatagcattttattttctattttatctttcactcatcttaaagtagtttgatggattaaaactctgtaattttcataccatgtaatgtgagctcctagtatggctactaatattgttaatatcacttctgaaaaatagagagattagcttttaaaacagctttggttgcttttctttctcttttttcctctagtttgtaattaccacaaagactgtctctgtcttattcatactgtgtccccgtgcgtgggtgatggcaggcccagggtacacatcttctgagctaatgcctgcatgatgaagaatggaattttgtataacaggcctctctgagaaggtatatgggaaggagaaatttgatccttgacctagaggaagcttatagtagtggaaaatactttttcctagcctgtctgagttttcaaagtattgtgctattgatatggcatcaatgactggaggaactgcagggtgcttggtcttgcgccagtttagataaaactacacagacacacgtgggatggttttaaggagccgagagtttgttaggcaagaaagaaggaagaagaaaatagctcccccgtacagagacagagggaagggggatttgaacaaagagaaaccccaagtgcggcagaaaagtggttgcttatgttgggatgctggaggaggcggtgtctggtttgcatagggcccagtggattggtttggtttgactaggtgtgtcatttacgtaacactgatcttcatcaaagtcttatctaattcaagggatctccaagctgcctttttacagtactattttcagtttgttgaatggttatttcttaaaatataagatgtaagtattaacagtatagatagatgggtggataatgttgtctggtcatagaagtgtcatagaaaaaaaataaagaaggtttaaggggtgagtgagtgggggggatggggggctgcttcttcagtcatgcttgctgaaggttgtttctccaaggaggtaacccttgagctgtgaagagagagctacagaactacagctgggggaagagcatttcagaaacagagaacaggctttaaagggcttgaggtggacagcaagcttggtgtgtttatttaaaaagcaaggcaaaaaataaaataaaataaaattttaagaagccagttggtcattgtgcctggagggcagtgaacaaggagaggcctgtgagtggtctcagagagctagtcttagagcaaagggaatttcctctccgccctctgaagtttccataactgagtctgctgtcatcaactgacagtagaccaattaactggagaaaaggcaaataaagttattacctgtgtgggggcacacagtactcacaggaaagtgagtacccaataactcaatgagatttagaaatgcatgtacccttcttcatttgaaagagggaactgggggctgtaggcacatttagaggaaaagtaaatggtttttaggggagaccaatggacaggaggaacagacaatagactgagacaaagttcctgtaggccgggtgtgaatgtcaactctggtctttcctgggagttaatcttccttgtttgatgagattatatgctttgggaggccaaggtggacagatcatttgaggtcaggagttcaagaccagcctggccaaaatggtgaaaccctatctctactgaaaatgcaaaaattaggcaggcatggtcacacgtgcctgtaatcccagctactcgggaggctgaggcaggagaatcacttgaacctgggaggcagaggttgcagtgagccgagatcacgccactgcactccagcctgggtgacagagtgagtgagactccgtctcaaaaaataaaaaattagagaaactttttgaaaagagattatagagagggagctcaagacaattgcattgcttctggaggaaattccctcagtcagacaagggaacttcagggaaagcccctcccctcacttaggaagaggcagaggggtgagaaatggagacaggagagggcaaaagagacctggtttctgaggctgcttctttagttcaaagtacgcagatgtcaaagagccatactttggggtattattttatgagcctcaacattagccaggggccagatttttcaggggcttgaaaactgtggtcaggactttggcttttattttgagtgaggcagggaaccactggagagttttgagcaccggagtgacatgatctgccagattttaaaagaccactgagactgtaggggaatgaggggacatgaggcagatgaggaggcccctgctgcagatctggcaagggcagatgtggcgtagactaaggtggaggggttagagatgacaaggagtgggcatgctctgaatttatttgaaaggtagagctgacaggatgcactaactggatatgacagatgggcagtgtggtgggagagactgatgaagtcaagtatgactttaggttttgatggcaccactcatagagatggggaacgtagattcaggcaagcaagtggaagaaagagttgagcttggaactgttggctgtgagatgcccggatagacacccaagtgcagatatagagaaagcagtggaatagatgcatctgagttcaaggcagaggttgggactagagacataatttgtagttgttcacacataattgatactagatcagatcacctagggagtgagtggagacagggaaggggtccaagggccaaactcaaggcattccaatctagtcaagaagatgaaaaaaacctagcaagggagactgaggaggtgatgctaggaggcaagaagtatgcaaacaacaagtgtggcgttttgtagtgccacgagaagaaatgctccttaggaagaggccattatcagctgtttcaagttctattgtaaaatgaagatggcaagtgatcagatttgacctcatggaggtcactggtgtccccagtgagagcagattcagctatgattcaccgtctgattacagaagttatcttatgattgcttttagtttcttagtgaaatgaggatctaagttatctgatgaaaaatgaggagggagggaaggactctggaggtttgtgaatagaggagaagctgtacatagttgtctgaggagtgaatcagctagaaaaatacagtcagatttcaaacagaactaagaactctcttgttagttaaggtcataaatttaaatgagaccagacagcaccattgtatgcttttctccagcctgttcggctgttcaggtgggtggaggaggcagagaataggatttaagctaggttggttttgctaagcaaatatgatagagagaagaggtactggggatgtattcatgaatacaaaaggagagattataattataatggaatagaagttaggtaatgaggaaagtgaagccatgaatggggtgatggacaaggaaaaggtggcaatgttaagagtcacagcaggatcagagaacttttggaatgtgttgcaggttgcaactgattggagccagcattgtgggtggtaaaataatttacaaagacagtagtaagttaaagaaagcaatgggcagcacagcagagaaggagctgtctgcaaagagacaggatctggagggaagttttacagggtggtgccggaggggctacctacagataagcttgtgctgctggggctacatgcaaagcgaggtatttgggaacaggatgttgtgtcagcaggttgttggtggttagccttctctcagaacaattgttctctccacacttggggcatcttccttgttgtttacttatcttgtcaggactccacagaatgggcatactagagagagtgaattggaaagacacaagatggtgcttgtaaacttacgacttcagcaatggttctgtattttcaatgacaaagcttaggctacagtcacagcaaaagctgctttaggagattataaaggacaagacctttgggttgaggagggttgtggaactgagaagctaggtattgggtagatcatctgtgaggatattgaagttactaagaatgatgataaagagagggaagggtaagaaaatcgtcaatgaattgtggcatgaccaggtggagagtaagtgtcataaagagggatagtggatagtataatgtcaggcacctcaaaggaactgggcagggagttagggagtaaaaagggcggtggtctggaagcagaaaggaggagcagtggtccagtaggggctgcagagctgcaaggctttgcctcaatcctgtcaaaggcaacttcaagctttccaggagccatactccttcatttgttcattactttctagattaggaaatcaccactcagcgactggggtctttgcctgaatgtatttcagaattactaagttggttgaatgcttccacaaatactgttttcatggagagcacttcatatttacattggaaaagagctggtgccatcctctccacagaaacaaggctgacagcccttaaatagctttggctatctcttggggagatcacagtttgtgggaaatcgacaacattaccatggaacataacttggaaatgatatttttctttgctcgccactgagcattttggacttgggaaacaggctaccagaagagtagttattgggaaagggcaatcaacacgtgctttccttggctcatgatttcttgccattttttccggcgttgtaatcaaacctgtaggctactgattatttactcattaagttccactttctcactcttcccatttcaaagtagtcatttaaaaaattgcccgatcgatgatttttatataggaacaacatattttttatgaaagtctttttcacaactgctaagaagctttgtcactataagctgtcacaagatggcatcacttggtagtcttcaagtctaattagttttcttgtacgcctgggtgcatttttgagctataaaataaaacttgttgaataaagtgaccttttttttatatgcagtctagcctattttggaattgtcctttacaaacatataacatgatgattgatcagatggcatttgggtctgaaattacttcttggatgtagaagagaacaaggccttgttttgaaagtttctgacttaattattttatttcaaaaaagacaagaaggcatatgcagaatttgaagggaattatagattctgccctgaccaagagaaggataagaaaatcatcaatggattgtggcatgaccaaaagcagaataaataacataaggaaggctgtagtcccatggcaggcacctcaaaggaactgggcaggaggttagcaagtggaaaggatagtggtctggaagcagaaagcagaagcaagaagtacacctattcagcctccaagaaatatatgtagccttcaggacaccctagacaagaaaaggctctcagaaagggaacaggtattgagataaataaatttgaggtggacacctactttgcatcacgacactgtgttaagacctagagatctaaacatgaaaaagggatcttctaaagcatcgagtggtctagcagaggagagagacatggaatccagtagccctgttgagttagcattatactgaaaaagagaagtgagaacagtttatcctcttgggtgagtagggagctgggatcctacaaagaacaagaatggagatatctgaactggactttgaaagatatcaagaatttaccacccattttggataggaatgggctagagggtgtcagggaaggaatttaaagatgaggcaacagcctgaataaaggattaaggtcacgaatagggtagactttgggaccctggggaagtagcaagggacagcaagaagtgatttggatccttacatatggaaaagactctgagtttcctggcaccctacctttgacagatttaggatgaataaaaagatgtacatgtgtttccaagatgttacagagaacactcatatttatttgatacttacatactccaagatattcagaaatcagattattgtactgaaataatgcagaattggaccatttttctatgacaagtctaaataatttatctggtggatgttttcataaaggaaggttttacacctgttcagtgtgtggtttatccaaatacctttacttcggaatttgtgcttgaaaatagattctgtatcttttggcgaatgggagccaagggttatagtggtgagtatgaagggagatgagatagggtagaaaaagaagcagctgtagagaaaatgtagtgtagaagcagatagtataggaaaaaaagatttgagctgagaggagggtttatttcctggtgtgaccagttaggagctactcgaccttagactaaagtcccttgacctcctggagtctgatgccttccgccatgtagagggaggtgatgagctattctgaggctcataagatacaacgtgtgaggcatgagagagccccttttgtgtgccataaaactctgtagaaatgggagctgatagtcctgatatcttggtatactttgagaatttagctttgttacaacttcagggtcacgggttgtgggatgaatggctcactgaatgcttctcaagcttttgggatacaggaacatgtctcacctggtacgcttgtaaaaacatcaaatattgggaaccatctccagaattcctaatttaatgtgattaggacagaatttaagaatctgcattttgagcagacatctcatgagttgcgaagacagtggaccgaggagaccattttcttgtagaaactgtcctaaaagatcttaaaagttatgtgcatccagtaaaatcaggccagaagttgcccagcctattaataaaaccttggactcaccttctgagaaaaaatgcaggcaccctttgctaggcttctgaaggtcctctttgacaggcaccccagctgagattggccttgttctcctgcaccaaataaaggagttgctagcatttttgaactcctatgttgtgcttgtgggggaggatccaagaacagattaccctgcttgctgctagcagaaacccaaacccactgcagtctcccatcacattgaccattcatttgtcagcagtgcccctgggtgggaatcaggctgacagccttccaaaacctcccctcctgtccctgcttcccccacacccctgcctcaagggacatctgtgatgcactggaaggtgacctaaacatttggccagaaccctaattctgatacttctggttctgtgacccccattaattcccttactttccaaacctccaattcctcacctgtgaatgaggaaggtgcacctgggctgcagcattgctgtgaagatgaagcaagtgcttgaggctctgtgagatcctgctgtgtggggtctgctgtccagatcatgaagaactcttgcccctcaggaacttgtatgtagatgctcttctgagcaacaacagtgaatttggaaatcctgcctaggaatcagagcaagggtccaagttgtaggcatggagttgaaagtaaaaaccagcattttaatttttactacaagataattagcttctgaataaagatagtaattttgtattgaaacatttaattccccttcttccaaagttcctactgaaatgactaatacacacacacacacacacacacacacacacacacacacacacacacacacacacacaaaacatacccatacactgtaccagaactggagcagggaagagtgaaatctactcattcattcagcaacatgcaaaacacatacacctttaagttgccagattctcaatggattcattttatatggctaagactgttacatgttcaacagtaggggaacagctaaataaataaaaaaccgagttgtccttaaagatgatggtgtataagcatcattatttacatataaaaagtattgttacactaagaagattaaaaaacaatatatacaatattatattacaaccatgcttagaaaaacctttaaaaggatatgcaccaaaatttttgacagtcattttctgtaaatgatagggatagttcaccttttaaaatattgcttatctattctgtctagtttaattactttgaatttaacatacttgcgtaataaacacatatgtctgacaggttgtaaaaattggggcttttagacttcagctgcagacctaaaatatttgcatagctaattaggggctcttgtgtgatgtccatctttatgtcaagagagtagtacgttcaagagtagtatgtcaagagaggcacggtggctcatacctgtaatcccagcattttgggagactgaggtgggtggatccacgatgtcaggagatcgatatcatcctggctaacatggtgaaaccccatctctactgaaaatacaaaaaaattagccgggcgtggtggcgggtgcctgtagtcccagctactcgggaggctgaggcaggagaatggcgtgaacccgggagcttgccctgagccgagatcgcgccactgtactttagctggggcgacagagcgagactccatctcaaaaaaaaaaaaaaaaaaaaaaaaagagtagtgacttccattatttggcacattgacctcattatattgaaatgtcttgagagtctttcactctccagtgggtcacctaagaaatgctttgggaataacaaagaggtctgtctcctccaggagatgatactgctctcttcctcctctgctctctgtgtatttttttttccttcccagctattcacacaccagtagaatttctcttatgtaagtggacctctcttgagactctgtgatggaaaagaatgtattcagttttttcccccttttttgaaaaagcatcattacaattcccgcttcccatccattcattttcataactgagtctagagtgatttcttttttctttgaactttacttgaatgtatcccgtccctttcataagagccacttttacctgggagcctcagaaggttagagtgatgatatggaggtgctgccttattaatcaaacgtttgctctgtgctgggcattaatcacttaaagctgcacagctggataagattcattagtgtcttctttcactgtgctcgtctccccgccccgcttgctcttggaggcatttactaaaatgccaccagtgcttccatcaccagctccatctctctcccacctcccgtggccacgtgctgtgtttggcccctgggtacagagaaagatcactaagaggttaccaaacagaacattaaagggcctctgatggcttctttgactgattcctttcaaatctgcctggatcctctggaagcctcttctcaggatgcatgttccacactgagcccagtggctgccctcaggagtagatgcaggcctcagagatgctgaacacctccctggcatgggtttgcgtgggatgcacctgttcatcagtcatgccccctccgtctggggacatcctgctggtgcccagaccatcctccctgcttcctgcttccttgccagatccttctctaatccacttcctgacttccacatagaggtctttgacttcagagtcccttgctttggcctttaaaccccccttcatttaatcattcttcagtaaacatctattgagtgcctgctgtatgccaggctctgcagcagtcactggggacgtaattctgtgccagagaaacatggttctgacctcatggaagtttctagcagagaagacatgtaaaagcaaaacagaagagtaaacaaagcaacgtggtctcaagcgtaagaagtgctgtgaagtcaacaaaaagaaacagagacagaatctactaggagtgggcaccatattttgaatggcgtggccagagaagactgtggtccttggaccaacaccaacagcattgcctgagaacctgctagaaatgcagattctcagaccctatcccagacccacttcagtctgattcatcagagactcccccagcagtctgtgtttaatgagccctccaggtggttccagtggccaccctagattgagaaccactgattaaggctacgtgatgggaaggaggtaggtatgtgaagtgtggaggaaagcaccttccaggctgagggtccagatgagcaaaaacaggagagagcttggcttttttgaggaactgaaaccaagaccattttggccggagccaagtgttggtgatgtgggcagggattaaatcagataggctcttgcagaccaaagtgaagggataggattttaacctagttaagaagcccttgaagcatcttaagcaatgccttgcactgatctggactcccttttaagatgatctctattgctgagtccagaatagattggagtggcttaagaatggaagtgggagaccaggaaggaggctgatacacaggtccaagcagtaaatggaggtggcctggaccaaggtggcaacagtaggaataaggtaagaaggtacttgtgagatatgttttagaaataagctcaaaaagacttgtggactgattaggtgtggacaggggtagtggtggagagggggaatcatgattgacttcctggtgtctggcttcagtaactgggtagatggatgggtcatttactgctccagagaggcaagaagcagacacgccctctcggccttcctctcagacactccgtaacatggtgggtctgaaatcccactgtaaacagcttcatggagtgcatcctcagcttgtcttcatgggccagtcctcagttcagcccagacccctgagccctcatggagatgaaggagccattgcttcgatctccataagggctctgtccctctagcgcaatgtcttgtgtgcagtgaacatttgagaaatacctaaatgactcggtctgctggaagagcagtattcctgtcagaaaaatattgagtcagtccccagccttgattaaagatgtataattgttaccttcaccttaggaaggacaaaagagataaattgcctggcgccatgaaacacagacagcccaaggggttgaaccaaagacagaagcagaagataggagtggccaggggcccaggagaaaataggagaaacctgtggcttggtggtgagtgaccctttgcccagtcacccactgtgaagagtgaactgcaggaggaaatgggaaggaaaacagatcttttgactctgctcatctcctgcagagaaggtgggctggttacataaaaagctactgtgggctgctcagttcctgagtcttgctcacagggctgaaggaaacattccctctgtctctcacagatgttaataatgagcatgccagtcaatccacccagtcaggagtcgctcatctccagctgtcccgggcaccttgttgatggtgggtcttgcatagtacattgtttcttgttttctgtgtctgtttaggatatacagggagctgtatcttctagatttaaatgctgaaaaaaagtggtgagtgagaaggggagaatggaaatgagatgtataggagcatggggcgaacacagcacgagggaactccaaccgaaagagccataacctaaatctgagaagctaattttgcagaaccagcttagccacgggactttggggatttgctttggaaagatgtttgcattgtctgtgtcattggcatgaggccacacagtagttctcaaatgggaggagggatttcgcaatgtctggagatagttttgtttgtcacatctgggtggggtggtggaggagggcactggtatctagtgagcagaggccagagatatgctgctaaacattctacagtgaacaggaaggatttgccatggggatgaggggagttggcaatgtctggagatagttttgtcacatttggttgggggtggggggccactgacacctagtgaatagaggccagagatgctgctaaacattctgtaatgcacaggacaggcttccacaacatagaattatctggcccaaatgtcagtagtgccaaggttgaagaaccctggcctagaccgagtgaagaggacagagcaagagaacctggtctgatgtctgccaccgagagagggtgtggccatgcacattgagaagggggctcttcagctggtctgtcatcaaaggaaccagatgagaaaattccgtgaagtcccacctgtcttttcagctcttgtgtgagtctccgtgaaaatcagcagatatttatatcctccatttgtggccaaggcacaaggcaagggaatgtgggggaaacacagtggaataagaagtggtgccgtttccagttcagtgatagggtctctcatcatgcaaggcagatggaagtaagtacctctaccatagggtaaaaaagtgttatgagatctttgaagagtgagtgagcaggccaggcatggtggctcacgcttgtaatgccagcagtttgggaggccaaggcgggtggatcacctgaggtcaggagttcaagaccagcctgaccaacatggtgaaaccccttctctactaaaaatacaaaaattagctgggcgtagtggcaggcacctataatcccagctactcgggaagctgaggcaggagaatcgcttgaacctgggagacagaggttgcagtgagccaagatcgtaccattgcactccagcctgagtgacagagcgagactccatttcaaaaacaaacaaacaaaaagagtgagtgagcagtaccttctatagggagcatatcctagaggctctgccgtatggtgggaaaatgttcaaatcccttttgcgtcttgatgtatataggaaggtggttaagagcatggatttaggaacagtgagaactgggtttgtatcctagccctcagtttccttcttcataggaaggagatagttgtagggttatagtgaagaaaaaaatgagataatctaaaatggttcaaatagcacctggcacacagtcaagaggtcaataaatggtagagactgttgtggtatggaggaagttactgctctgtggaggggtagtagctgtgtgattttatacagttgatttaatttttctgaacctcagtttcctaatctgtaaaagagagatgaaatgatgtgctctgtagaacctttgtaaggataaaaggacaatgtatgccaagtgcctggtgcatagatgacattctaactcaatgtgaaatcttctccttactccggactttggttgaaggagtctggtgtcttttgcacatgatgatgtcaacttgggtccctcacattgccttagcgtccttcacccaacccaccagtgcaggacatagtggtcctccccaccccgcccattgtctacccctctaaatgattttaagaaccaagtgtttgtcctcttaagtacttataaacttctctaagataaatattttatataaaatcaagtacctcttgatcctagttatgtttttcaccacttatctattcaaactacacttattgagcatcttctgcatgctaggaaccgacataggagttggggataataagtcaaagaacgcacaataactcacttgactgtgtctatgatagacaagtgtttgcctagcttatgtcacttgaactcgaccttcattaattttgccatattattcagttaaataaacctgggctacatcctgaaggaggaaagagagtcagccaggaaaagaatcctcagggcctaggtggttgtggggaggtgatgggacattccaggcagagggagtggcctcttgggtggaggccagaagagagaaggatgcttctaggtcactggtcagagtttgaggaggaaaggagcaagaaatgcagcaggtgaggtgagccaggtcagcttaggaagggcctcgtataaattgctgtggagttcagactttgacccaaggttattgaagaccacagaaatattttaggctaaggaaagacatgatcagatctgtgctttggaaagaaaactctttggactgaaaagattaggaggccaacgcctgatccaagcaggagataaacacctgatcaacgtcatggcccagattgggaatgtggtcagtacgtgtttaagatgtgggatcaacaggtttgggtggttgataggttgtgatggagagtgagttggaaaatgagaaactggggatgatttattggtgggcaatagtacctgcaattgagatagagaatgtgagaataagagcacaccaggaatatgggagagatgagctcagtggatgaactagatgtgaagtgctttgggcacatccaaatggagatactgtcctgctcaaagctagaaagtgaattaatacagaaacaaaatcaaataccgcatgttcacccttataagtgagagctaaacattgggtacacagggacataagagtggaaacagtagacactggggactcccaaagcagagagggagcagggcaaggttggaaaaactacctattgggtactgtgctcactatttgggtgacgggttcaatagaagtccaaacctcagcattgtgcagtatatccatgtagcaaacctgcacgtgtacccccaaatctaaaataatttttaaaaaataacaaaaagataaattgacaattaaaaaataaattaattcattgtgattatttttaaattttgctgaagagcctatagaggaaaggtgagtgagatgggctggagaaattggagtcacaagaattagataaaactgttaagtcatttgaatagatgatctcaccgaggaagaaggtggggagtgagaagagaagaagggaccaggactgtgcatctgcatttaagagacaggcaggagaagatgaactcccaaaagactgaagaggataatcagagaagtagaagagatgactattttcagtgaaaaatggaggatcttgatggttttagaagaaagtgggtttttagggagagcccccaacccctcatccttaccacagataacaatagtcctttggaaggcacggagcaacacaaacacagaggtggttgcggaacatgccattctcattttaactaagggtggctttgaagattaaattacaaagaagcagttgggagaattccagttttgggtcttgacaactctttgtcttcatagcatagcatgagggtccagtggccacttgggcaacagatgcacttaccctgtaaccatgaataccactcattctctcacttactgggaggggactgtagtcctcatagctgcccccagtctccctttctagtgatggaaatttcctttattgacagggaaacagcaggctaatggcacagatgaaatgtaaattttgacagccccgacaggtaaatattggctttgcacaaacaagtttctataaataacctgtctgctgcagaaacgccacagatggcagcagggctgcccaagtgttgatttttcccagggtgcttggtgcagaaaagcacagctgtcagctttgctgttcctgttcccagctcaggctacctctgctgtgcctgcagactgtccacgtcccatcctcctttggcaggagaggcagggacaggtggagatcagtcatttcaataacctacctccgatgcctttcattccaggattccaaaggagtttcttaaaaatgtcacttccttgggttctacagtccaaagtgggaatctgtctgatctggggatgtgttcgccccttttaattaaagttggtccagttgaaaagaaaattggatggagtgagatacagtcactctagactgtgtgccacatggccctgttgctaaaaatagtaccgtcaaggactctgggcagtatgtcaggctattatgttagcaggcatggactctgacttaaggggaatgtgaggggtatggagccacagcaagtcatctcactggggaaatttgcccgatttaaccccatccagggagctaagggaaacacagtgagccactattggaaaaacagaggcattcttatttttcaactatgcaactaagagcccataactctaataaagctgattgaggtaatgacattctaaatgatcgttctagggattcccggaaagcttcgtgctaagttaaatgcccgtcactgaggctgggctccggtttggggtatgcctgtacctccctccttccctccctaatgtttattttctgctccaacttctttccttaggctcattgacttagtgcatttgtattgtaagccctttcaaaacccttgtgaaagtagaaaaggaagaaaccatataaaagtgagtcagaggattctagaaggtacctaagatagcaatagtaacttaaaaacttattttatatcctacaaaggctttgagaaaatgtatgacaataatggaccttgtgcaattaaacaatcataattgaaaattaggaagaaaacaatgttgagaactggaataggaaatcacctgtgaataatgaagtaatgatggtaccacacccagagcaaacttgtggcgttttctttagccttatccccggagagtagagcaaagctgccgtgagtcagcaggcgttggaaaggacagcaaatacacttgctattgccctgggttcgcagagtgaattcaggaccctttattcccacttcaaggcaaccagtcactgctagcataggctcctttgcttttctggtggggcagccccttctagctctaattctacattaagaaggtgtactagtgttttagagctttgggccttttctcccaaatcttgtctccatgtatgagggcctatgttttcactaagggctgggaacacttcctaggctgggctacatccactccattgtgcttcccaattactttctatacaactggcttccagcaggcaacaaatcaatgtctgtgaagtcccgttgacttcaaggagctccggtcatcagagaaactgatctcctcattggggaagagaccagtgacatgcttcatgagtaaaattacagcttgatattcaccagtagaacttagcaagatgctcagcagagaaaataatgaatcatcttttgctaagcctgtgagaaggatagaaaatattatacgggaggtcccaggagtagagtgaaaatcatgtgggctttgaaatcaagcagactttagtttgaatcgtgcactccttcgtgtgagctggtggactttggtcaagtttgagtctctttgaatctcaacttctccattttaaaaatacagatggtgataattggattctcaggattgtcgtgcccaagaagcagcctagtgtcaggtggcaagcagggattctggagccacattgccaagttcagattcctgctctgacatttactagctgagtcatctgcagcaaattacttagcctttctatgttcatgtccttatgtttaaaatagggaaagttgccatgaggaatagttaatctatgtaacgttctaagatcactgtgaagcacataagagctgcatgtgttcttgtggcaataccaggtggcattgagcagagatgccccacctgtggtactccccacctccatcttgctctcttactctccctgttcttttcttgatcatttttatgtttcctgatcattttttaaatgtgaaaccagccctattgttgtgattttcctaaaggattgtgcagaccctgtctagtgtatatccaccctcagagcagaagttagcatgactttcatggaaagccaggaagggagctctcgaggaaaaagatgagtgttgttattcagaactggggttaaggtttcatttcctttttgttatgaaaatatgttctgcaattgaaaacaaaagtgcaaagcgttctgaaaactaaaagtaatatacatgtttcttgagtaaggagtgaatgaactatttagaggcatataatacacttcacttattcgaagcattaaatattccagttactcattcattcaaactttcttacgtagcagttgtacatggttctatgccagattctggggatagaaataggaacaggacagtccttatcccccaaaactccaatcaaattgtctatgaatgaaattggtgatcaagcagttgaacaaagagcctctcatgactgaagatctaaaatgccaacagagagcacagagacaaggagaggccagtggcccttttgttaggatgagtgtggcagcttagctgaggcagagcttacaaaaggtaggggaaagggaagactggatttatataaacaccgtgttactctgaattttttacgcataaaagaaaaggtattgttgacagtcacagaactgcataaccatagtagataagggatactgaacgtacacagtggaaggactttaatgaatgtgtcgcctgctcatttgcatgttcacccacctcgacccgctgcagtggccagcgttgtccccagtgtacagatgtgggaactggagctcaaagggaatgaggcagtagccctcaccatgagcacctctgaggtaggacccaggttccgcaggtagtctgtgtcacactgaactgtcccacatgccagcctgccgtgaccatgatctgaaggtggctggtcatggtgatttttgctgcatgagaattctggaagctgtcagtggcgtgctgtcaggactgcctttttccttccagatccttggacatcttttcttctctttcctgcgagcatcttatcagttactgagaaaggcctttctgtactgtgtattcattttcttgggaagtgttcattataagtgtagattttttacagagcctaaaaaatttcctggctagggcactaaatctaattagcatgcaaagctgtgtatgatctcatgttatcattccttcaagccagaacacagtgaacccaccatcaaagcaagtgctttcttaaaggtaaactatgccatttgtccagatttattccctctccatgcaaatctatggtttttatgtgactaaagataatctgttgtctacgccaaagaaaacgtcctcttcatttccctcctgaaatccccatccatgtcataagcctcctcagagggtggcagcacccacctgtctcctgagacagagaaaatgttgcttttaagcctcactacaatttgagggttgtcacttgtaattactttatatttctattttaagcattgttgacatgctctggtaaatcattttgtttttctagatatagctgagggatcttagaagtaagtaatgtgcagctgcgcttcctgatagaagaggaaagacgttctagatatggcagagagggggatgcctccttagtgagtcagggttgggtgcctcccagtggcctttactattctttgatccacatccgccaggttgtgaagcagctacctggaggtctggactgacaggggagtgctttggactattgtaccttgaaaaaaattgtctgtgtatagccattggtgaaatgatgattgtatagtccattggttttatgtaaattacaaattaatgttaacctctacctctaaaactcttgctccctggaaatcattcagcacgaagctaaggtgatgctagcttactaacacgatttcaaatccaaggcacctggggtggagtaagcagaaaggcttaggaagcagaattcaagtcctgccacttcccaggtgtgtgatctgaggcaaattgatttacatctctgagcatcagtttgctcatctgtgaaaccagaggaatgaggcccccctctcaggatgttttgtagagtgaatgcagtatcttccaaatggagaagatgagttcaatcctttgaaagtacatgtttggccatttgcccaggactggtcacaagactgaagccatggaacttcttcctagagatccaaattattaggtttggcattctattctaatggccctttagcaatgccatgtcaaatgctcaaagtgacaatttctaaagggaactgagaaattcataggtgttatgctaggagataaaaggcctcacatgaccaaatgtttgtgaaatgctaggtttaagaaggtgaacagatttaacttgtagatgttaatatgtttgtagataagagatggagtttctcaaaacattacatcatagaatcctttcctttatctcatactccctttctttcttctgccccacccaacacatcgtggaacctgtgtaacccagagcttactctgaaaaacactgatctaaggaattccaaagttagtgttctcagctcttgacacctgtgctagcagaaaggcacattgtcgtagataatgcaaataccaaacactatataaaaagcaaatctgtgacttctgaatataccttatagtaagtgaaggtgattgattcgagcactaggcttttattctacatgttttttatttagctgaaatttcagaaatcaatttattcttttagagccaatctggataagaagtgatggaatttatccaaagaatgtaatacataattggaaacaaacttggaatttcatttacattatttaggcatatttcataaaatgcagagctgagagccgatgctatctccttcatgaaccttctctagatttcccagctataagttatcttttccttctccagaccagttatcacactatctgtgcctctcttgtgcatttataactttcctaactatataaatcttcctttataactgtcgctgttaatgcaagagctaattgtgtgcatggcttgtctcccctgctgatgaagaaactcttgttgtagagtcccccagtgcctagcagagagcctgcacatgctagacactcaaatgtttgacttggtgagagtttcttttatttccctaagattgttaatttgtcattattattgttactaatagttgtcaattaactaatatttcatgaacatctatgtgctaggcaatttgcattgattactatactcaatattcacaacagaactctgaagtagatacatgtcccctccaaaaagaaactgaggctttaagaatttataagtatcttgcccagtatcagaactaatattctaaactacaattgtatcttgcccaagcctgtgctttaaatcactaaattaccctcttaagggctaaagaatatacaaatacctgcaacccaaaagggcagcctcagaggagctttggtagttccctattctccttaagtcccactgtagaaataatcacccctaggaatgaaagacttgaatactactactcacttgctttctcacatacagtgtgagtgtagaaggctctccttggcctattctatctaaggttgctttcaccagatttgccccagtgtgactgtaagcccttgttaagcttgggttaattgccaatttaggcaaggttctcatttagaaagtcccttcagggaaagcagcctcagaactaggagatggttgtctatttactcttcactcacccagctgctaatggggttaggggaatggcaacaacatatgccactccagattcttcccgtttacaaagtcttgatcatttccacacccaaaatcctgtcaattgccacctgtggagtcaggcaataaaaccaaccagtatttattgagcacacgtcacatgtaaggataaggtgtgtgttatgaattcattcatactggtttgcttttgccaggagcatacagtgttgtgaagaataaaacaggaaatttgttttcttattgtgggtcagatgccactccacgcatgcctccggccagccacttggcccctctgcctcccagatccctgagcagtgaaagcaggagggtgggcttttgcaattcctgctctctccttgtcggcctggctttctgagagtggggcaccccccgccatcccagggaaagggttgatctgcactttgaacatgggaacccttgtctatatgtggcatggtccagagccacagcaatgcttcccatgtattctgttcaccacttcatctctgagaatattttaaaaatgtagttcttggttaagtgagctgaatcaaaacatatccaagttggaataggatctactctgtgtagacttgctggaagtgaaacacacagagcctgcgggaagagttgttctatgagtacttgagcccccagcctgactaggttaagtcttctatgagtacatgaacccctagcctgactaggttaagtcttctatgagtacatgaacccctagcctgactaggttaagtcttctatgagtacttgagcccccagcctgactaggttaagtcttctatgagtacttgagcccccagcctgactaggttaagtcttggagcagatcttagactctgtcttcggtaagtggccaagtctttggcctttgtatgctgtggctaggagataaaaaaaaaaaaactcatttcttaaatgtgttaaaatacagttatgtccatagtactttaggggttagtctctatttgtattagcttaaacaattttgcaggtaaatacatgttcattttttttttaattagcaatgtctatagctttgtttttaagagacaaggtcttgctctgtcacccaggctggagtgcagttgtacgattatagctcactgcagcctggaactccctggctcaaacaatcctcccacctcagcctcccgagtacttaggactacaggcatgcaccaccatgcccagctaatctttgatgtttaaatcaattgaattttttgaaaattgacgtcactgaacaaaatagacaaaaaaatctctctcatggaccttacattctaggtagccattgatgacaactaaaatagagaaataggattttcccatccaagaacacagtatccaaaatgaagaaactgtaataaaggccctcttagctcatgcatcaggagttggcagctgattagttaattaaaaagttgatgacagtggttatggttaatcataatatgatatatgcataccttaaatattttattttaacttaaaacatacaaatgcatgttaaatcaccaactttttaatgtgagactcaagctttttcttaaatttgcagattggagtttctaattaccattcttagataaaccatgccaaaaagacatcatctgtgatttccagtttcagttttcttaaagtggaacaagctctgaagacacttttgaagttatctaagtacaatctcttccagttttctgtggttgacccacccacatgtggttcaacagcaggtttggcttggtttcagcaacttgtttttatccagtctttcaaagcattcaacttggagctttttctactcatatttcatcagtgtatataatatgcaatcaaattacataattacaatgacaactataactggaagaaacacatttggagacaaagatccctaaatctcacatctcagctggtgggagcagaaacccaggggcattccagcatcttgactgtgagcttggagtgtcagcctgggcagcagtcagtatattttagaaaaaggatggaggatgtttcataaactggcaagtctgttatggtggccgtcttttaagaggactcctactgtactcctggatgcgaccataagcagacattatttgcagcttctagaatagtgtttctcagcctgagttctgtggcacctggcagttccatgagtggcctcaggggccactagagagtgttagcagcaagtctgaatccctccagcttccttcagctgtaggagctccacttttgttttatacctctcactgttgcatttaattttattcaaataaaaagactgagcaaaccattattatttttaaacaacgggtattgtggtgcttttagggaggaaatcttagactattagcagtagcatacactattgtcaatagaggacatctgataacagtctgaaatcctttaaagagacaagggattttaaatgtctggtttacacttgattttcttccattacatgtttctgaataagcactgtgttcattgcttagggctgctgtaacaaagtactaccaatgaggagccttcagacaacaggaaattatggtctcatagttttggaggctatgagaaagttatggtctcctagttttggagcatggctcacagggccttgctctgtctgaaatctgcaggggaatctctccttgcctttcacaggtttctgttgaattgctggccatccttggcatttcctcgcttgcagctgcatcacttcagtctctgcctttgttgtcacgtggcgttctccctgtgtgactgtcttcatattgccatcttcttataaggacgccagttatactggactaggggccaactctgctccagtatgactgcatcgtaactaattacatctgcaatggcactgtttccaaatagtgtcacattctgaggtactggtgtgaggacttcagcatatcttttggggggagcaaaattaaaaccataaccggtgctaaagatttgttgaatatagttctttcccctgcccctagagactgccaaaaataaaacaaagcctcccaacatttaaaatgccagtgatgtccctgtgcccgaataaaactgaagtagatccctgggagaaccccctaattgaggtgaagcagtgtggcccaaaaaagaaactacaataaaaggaaataccatattttcagtgcttactctatacttaatcctgtgttaagcacattctttttttaatgtatcttccccaaaatcctaacagatatctttagcttttcatatgctttcatttgtaagcaacagaaaaccaaacattaatggtctttaagaagaaaatgggccagattcggtggcttacacctataatctcaacactttcggaagccaagaaggaaaaatggcttgaggccaggagtttgagaccatcccaggtaacatagaccccatctctacaaaaaatacaaaaattagccaggcatgatggtgcacacctgtagtcccagctccttggaagactgaggcaggaggatcacttcagactgggaggtggaggctgcagtgagccatgattgcaccatggcactccagtctgggcaacagagcgagacccccatctctaaaaaataaaactaaaaaatcgagagaagaaaatgtgttggctctttaactagaagccagactaaggtagaattcagggccagcgtaatccaggggtggtagcccatttccccatgattccctgggctcttccctcctctgtgtggcagctttattgctcagtggctagtaagggggtggcagtagtgagggacatttgcacaccacatcatcccatggaagagacaggggtctcttcagaatgtgatcccagaaggatggaaaataattacagaaacactgaatccaccctctgcttggtccttggcttgaatttgtgcccacttctatttctgaaccaaatactgtcacagtaaaaggagttgcactcagaccaatcagggctacctctggaggtgggtggggtggtcagcattcactcaggtgctagggctgcctggagggtgagtggacacctgaataaaacagggtcctcttaggaaggaggagggggcaatcttaggtaagcaaccaacagtatgcactgcagcaggcccagggtacagatgaaatcactcagatttagggagtcgctcacttctttccaaaatcacacagcttgtaagtgttagatgaacattcaagaccaaatggctttgactttttcttgtctagcataccaccacctattctcttactggaggggccagccattttcctaggctttttggagtagtagtgtagtcttagcttattagaaatggccttcaaaaccctcagctgtgcaccttatagtaagagcattaagagcctcaaaatgtgtgtgcccctttgaatgaaaaacgctgttgtggtgtcattgagtgttgagagagaattctgggggtgcctgtgctgggagaatgccccacctgaatagacagcctcagtagaaccactcactaaatggtttgcctccttttgtgccttaatgcactttgatcaagatatcagataggttgcatcatcagataaggatggcaacaaaaaacagagctgctctcctcaactttgcaattaggccagtagagtactagtatttttttttagaagggacaaggctgttttagtcctttacgtgtggctgataaagatatatgcaagactgggcaatttacaaaagaaagaggtttaatggactcacagttccacatggctggggaggcctcaccatcatggcagaaggtgaaaggcacatctcacacagcagcagatgagaagagtaagagccaagcaaaaggggtttccccttataaaaccatctgatctcgtgagacttattcactggcgcgagaacagtatgtggggaaccgcccccatgattcaattatctcccactgggtcccttccacagcacgagggaattatgggagctacaattcgagatggggtttgggtgaggacacagccaaaccatatcaaaggcaatacccaaacagcctctcaggaaaaacttgcagtggtggagaccacggtggtcctgataatattgttcacagtaatagcaaatctcccagatggaagaaaaattttcctgtgtccctggcatctcactcaagtgatgagaaatgaagaacaagcttcctcggcttagaccttggggacaacctgggtcattggctgtaacctggagttgaactccttctgtgcatttttctttagaatttctctggcccttagctatttaaagctttctctagtgtcaccagaggaggattacaaaatccaagagtttttcaaggacattttgtttagtgagcatctgacttcttgtcaaggagaaaaaaactattttgcccattattaaccttcatgctaattgtttcttttttcatctcctaatcatcaaaagcgcatgtttgcatttccatttcaattatttgcatccaaagcagaaacagtcccaatgttattaacttttataatgcccaaaagtacacagctgtgagcccttacctagccatgcctgagggttcccatttccctgggaaggcactctcagcaggtttggtctccgagctatgtgccgggagaggggactagagtgtggatgctgcgaagcccagcgctcttccctccgtgcagagctgccaaagcaaaggcagatgttgtcagcccttgcctcactttcccagatccactacccaggctgctgtcttgcctgagccttttaagaaagcgttgcagcagcctctctcattgtcttggttgtgggaagggctgagttaaattggccaggcatgtgacttgtcatccgcgttgccctagttcgccacagtccgtttcttgctatcatggcccaatctctgcaagaacttactctcccttgcaaattccctccaaacctgtgacttaccctcaacccagccctcttggcttcattcccagaggggtctctccaaccccagaagccacccaaagctgctgggatcctgctgggagagcctgtatcagcacatttcagacctttccataccaaaccctttttcaaaacaaaacaaaaaaggcttagcggaaactcagtaaataattgctgtacagcagagctgttgtcattcagatgggacgggcaacttgaagtcctgccccttgatactccgaggtgagccctgcctcttttgaacattgaagatcacagacctgaagtcacaagcctgcagccatgaagcctcaggcccgctgcctttctggcaggtgcctcagtgctacctgcctctgcattctcctctccaacttctgcctgctctgccagattccccaaaactccctgagttgtcatgtgtctggaagaatcccactgggttgcccttcatcccacagagacggagcctcttagcaggaaagcgttgcacacatcctattgccctggtcctagacttctgtcctcccagcaccccacacctgtcactctagggcatccaagtgcagagagtatttcacacagagcatttaaagtgcttcttatgcaattgtgatttcacagctcacttctcaccttagaggcttagcaggaactactattcgtcttcccataccaagttccaagataagagtgcagatgtaagcccttgaggatcttcaactagaaaatgacctggactttttagataaagcgactagttcttcctgtctggggcaccttggaccaaatggattaatatccttaaaaatgccattatacactctgttcctgtattgttttagctacattgtgaagagtcctatctaagcaagcttgggatacagtgattcctcgcctgcagcctggagtctcatagtcttctcaaagcacgggtgagtgacataaagatactgtctagccccacgtgctctgagctgctttgagcagaagttaactgggccaaaaggacacctcgttgtccctctatcatggcagtgcgggattgtgattgagaatgggacagaagtgatagcttcacaacttttcagagtcagtctctacacgatctctgagccctggctgcagcaccagccctgggaaggcatccgcccactgtctctgcagcaccccagaggatctcagacatggagagcaagcatttcccactcatctgttgcctgaacaaacatctagggagctcttgctgtcccgggcactgagcttggacactcagtgatgaatggagcacacagagggtattgccagcctgacagagcaggctgaagaggtacaaggagcccgcatcttggaaacatccaagagtctaatggatattagaggcacagagagaagaatgaaatcagatctcatctttgctctgtgtctgtctcctctctgatcctctcagcctgctttttcttcagttacagaagcataagactccatagaaccttccagctttgtttcacttcgttcacttagtttgtttcacttactttgcactgtattctcactgttgcccttgcccccacaagagtaagccacagtcaatccttttctgaagtacaaagacttgcatttagcagggtctgaattcaggagattttttcatccatgcatttcaagattcttaattagaagtagatggactcctaaatctaacacactttttttctccattcatgaaactggaagtgacagaagggtattcagcacattgttttcttttatcacgtatcgcccagtcctgaattgattttcatttgtctcccagttaatcagggaactccttgagagagagaaaacacagaaaactaatacttcttatgaaggaaactgagccatgtaccatgagggaacccttccctatgtgtggacaggatccatgtcttattgaacggtgtctagtagtgccttggttgcctctttccacagctatactaagtgttctgtgcatgaatgaatgaatgaatgaatgaatgaagttaactctccaaagagcagatcatcttacacctcagcatgtgttttagtatattgaatctttagtcttgtgtatagtatctggttacctgaaacaatgtattatgcagagctttctgattttcttacatatccttaaagagagaaagatatacacaaaagttcctagaacataaaatttgctcaattagtgtttaacacacacagatggttattaagagaagtctgtagctagggaataccattctccctttcgtggaggatgtatctccctccacgtgtgcccaaggttacgcagctcaagcattggatttgtgttcaggttgcatgtattcaggacatgcactccaccatgtgctgggtgtgccactgggagctggccacgtgcttataatttaatcctacagcaactctgcagagtctatattagtgtggtgattggggagatgatgaaactgaggtctgtttttttgagacggagtctcgctgtgttgccaagctggagtgcagtgatgcaatctcggctcactgcaacctccgcctcccgggttcaagagattctcacgcctcaacctccccagtagctgggattacaggcacacaccaccacccccagctaattttttgtacttttagtagagacagggtttcaccatgttggccaggctggtcttgaactcttgacctcaggtgatccacccgcctcagcttcccaaagtgctgggattacaggcgtgagccaccatgcctggcctgaaactgaggtcttaagaagagttttatttaaggccacaagttcttacaccacaggaccctattccagtagcatccattacgtcttaagcagctagtactggtcctgggagattgactctctgggataaatcccgaaaagctgccttaaatgttctaaaggaagcacattttattccacatttgtatccatccttttcattctagcatggtgcccaataagcatgatagtgaccaaagctttcatcttattaaattctgtattattttagactacatttcttaactatcaaattgacaaaaatgaatgaagtgtaataggaaagaaagaaactcttatccattctgaccgcttttgaggactgatggaggaagagataggagactgaaggtgcgcatgttctcacctcaaagttgagtctgaaaaggttcactgaatttttctgcgtgtcccctttgtgcagaaagagaggaagcatgtctttctcaccctagaaaacatgctttgaccgtttttgcccttgccttattggaaaacagctgaaattgtgagtatgacatgtttggaatgatagactttctcactaagggaggaaagcagagtcaagcttattttaaaaaatcagtgaggtgtttctaaaaacacagcattaaaaaatgatgtgcctgagcatgttctgtagaagatgattttatcctatcttagagggtatttcaattatgactactcttttgaggagcaatgcccctggaatacaggagtgagtaacagagcacagcatgtggcttgggaggcttcccactaaatgcaactcagcaaattaaaagcatatgtaattttaatgacagcctaagagaaatgaaccttcaaaggttaggaaattgtagttttcatttgagggaattgcatggagctagactttctactctttttatcttaaaaaggcacatccaaaaatattacagtatatgaacatggactaaaattcactgaatctgccatttgaaagcaagatacagcttttgaattagcctaacactggcttgctattgattttgttaacataactacattgggcccaaaaagccacctaaccatttctagacacatccagagggcataagtattccctggcaaatagtagcttgcccatgggctggggagacccgtacaccagggtagtcagttcagttgcattttatataggcaatgagctcatgactcctcagtgactggatgtgtttcccaactctctttgatttgcgttgaccagtgctcctcacagtaggggtgctacctaatgaccaacataatctctcaacataatttagggccttgtggagatgcactatttcattaggccacttggatctcatggagcagcagactattcattttctcaattgctcccgaagggatatgcagagctgatgaacctctttacttatactttgggagtaactcatggaccggacaagctctggcttgtttccaggggactcacttgggagtaatggttttcaagtgcatttgaaagccagtacaatagatttgaccatcatagacttgaatatataatatttcagtatacatcgccagctattttcacattgtggtgttacagtgagtctaagacatactctctataaaagtcatcagctgcttgacccattcattgtttattttttcaacaagtattatatgagtgctgaccattctgggctgggccacactaaacactgagctggaagaccataaagcatgcttaataaaggtttggagggtggcatgttgccccattaagaaatatttatgtgatcattttaatctcagcttagagaaattttcaatctgatgccttgatgtgtatttacctgtgtcttgatgtgcattccatcatatctaatgccttgatgtgtatttaccaatgctttggtgtgcactccatcagaaaactcagatttgagaggcaggagacttaacgggggagtgaccctagggaactaagaggaggtggcagcacttgcactttcatgtggagcttgaccccacttctatgtggatgaaagagtcagtgcagtgctggtggtgcggccagcccctggacatcaggaagtaagcctggcaggaatccataccccaatctgtagctgcctagaccaagcttaccccattagaggcagtactagagagtatggggctttggttctagcagagtctgctacttgctagccaggtgccccgagtaaaactcttaacctctctcaactgccctttcttagtaatctccactattagggcagatgcagcatgtagctcagtggctggccagataaaacttccataggtgatggttgcccatgactagtgaggtcatgctgctaccagtccctcctgtctttctggtcccttgttgtgggtgcacgtgctgtgcagctctttgtgtgtcatatgccacactttagtacattctcacctttcagaaaagctccctttcacatttaatctagtggaagaagacccctagttcctcagcaggactgtctgattccctgaggcctctcccacagccctggtgggtgggatgactgactgcactttagaccataggtaatagttacagtctggcctgggaatggggctgagagtttactcggcctgctccttcaagatgagcattgttaaccaggcagtgggaaccaaacagagcctgaaataggggttggtgttatctctctgttgcagggtgtcgctgcccctgatgcatttcttgtcagtgcttcttggatagaaggaaaaaaaacgatggtgtaatatactgttcttatcagagacttcacttttcaaatacagaatgccatttgtgtgtcactgaggctgttgtaattgccttctgcacctgatttacagttggttcttcttgactggttacactaaatgatttgcttaaagtcttattgattggatggggaagggtaagcattgccgtcaaggccctgttgagtcggtgggaaaggaggcagaaggagatttagaatgttttaaaataatcctattcttggatagaagtacaggtggcaggagacagccagctttctgttttctcatgaagagggaagatgcacttacgaatccgggcgttaatcctgaagcctcacttgaatcaaaggagtttatcttcttggttaacaagtggcaaataaataaataaataaaacttttgaatcttctttttctctcatttgccttttaggattttcagagatttactatcacccaaagacaatgctaaagcacaaagcgataaattttggatttctgaacaatcagagattgactggcatgagttattaagattaaatccaaggctggcttcccagaactgttgtgagatcaatcacctatttactgatatttgaactcccaaatctcttccccttgagcccattactgtagttaaaatgacagtccttggaattaaccaatttatttaaatatgtaaatagcccttgggcccctgtcactcattcatactctggtatgaactagttccttcaagtttgatctctagagtgatgctaaatgtatagggaaggctatgtgttttaccaaaaacaaaatagtctgggactgtctcacaaaagtaaggctgagtatggaaccactgtgtggtccccagttctgggctgccttgtgtactgtaagctttcaattctgctactctgactcttcacaagggaaaattatagcttacttcttggtgttagtgtgagaatcagcctaggtaaactctagaactgtactagcactaatttaaacaaggatttctatatgtggttttgctgttgagcagcagattgtaaattatattccatggaataagtgttcaaggtattgttaacaggcataacacgtaaaagtgttctgtcgcccaacaagttcgagaagcattaggttaaagaaacaatcttgatttcgctagttgtttctaaatctccagtactatatatcttttgcattcttccttgttcattaaactcatttgctaaggagtgtctcttgaggcagggatagcatagtgattaaggaatctggagccagataatctaggttcttggtgtggccccaggcaagttgcctcggttttcttgtctgtaaaatgggaataatagttatctactcctagggttgttgagacaattcaatgaatgaaaccatataaagcattttaaaatgttcctaatgcatggcaatttctctagaagtgttagtcttgttatattttttgaaactaaaaggctgggtatctttttaaatggtgctaatcaccaagagacaattcccataggaactaatcttatcaggctaattattgtttgctttaaaaataagttacggggattttaatttttctctaacacatatggaattaggaaaaaaattaatgcaaaaagcagaacacatactaaattatgggattctgttgcattaggaatatagaaaaatataaatcatgagtatcaatataggaattgaaagaggcctctgagcttcagcaatgagttactaaatggaaacatcagagtatcagatcttatgttatttgcatctccgtatattaagagcacacgtgaatgaattgtcccttagggttagtgtaagacactaagtagctggattttctttctatcctcttcctcctcacactaaggggaaaaggaggggaggggaaacttcagtcatatgggtttaagtacaattctgagtggatcccaaagctggaaaaggtaaaacctgagactccaacctcagttgggggggtcacttctcccatgggactctaggggggtcgcacaaagaactaatttgccctaacgctgcaatactgaagaacaaagaaaaaaatgcccacctaggtttaaaaattcaaagccaaattcttcagagggatgggagttgagtgaggcctgggtcctacccttgtcactaactatatgtgtgatcttgagtgagtcactccaggcccaagcctggttcttcacctgcaaaacaaagggactatctgcgattgtcctgagacttatgaagcagagtagagatgaggatggactctcagtctggaatttggggttcttcccttcctccacctctttgccttgggcagctgggatcttccttatgtaacacgttcaggaaaaggagggcaggaaggtaaaaatattaccctgcagttgtagccaagctgggttctggggatggaagaatgaagatgaaggggacttggagggaaatgggaaggaacagagcccatgtaaaatcgagattgattcttctggacctgggcagtcatctgtagtcagtcctgggtgtcgctgctgggtctgcactgaaaaagaggccaagggggtggtgctgggggatagaaacatccatcaccattgctcagagtgtttaaacttccagagattgtcattaaacaaatttctgctgcagcctggcagccctcacagacatttgttggaagaaaattacgagtaggtgatttgtcagaggtaatagccaggctgagctctggatccttaatggcatttggaccttttgcctttttaaaaattgcttgttaaaaaattcattttccagcctgtctttgtaattagaattggaggggtcggggcaaagtgaaaagaaaaggaccaaacagttgctgggctttcaggccctgcactggggccccaggaaaattgaaacgggttgggggcaatatagggacccaaggagtaatgggacagaagagactctgctcataaggaagagaggccttcctggaagtacctggtcattacctgccaggaatagcatcctttcataaattaaggtcttatcttctgtgcagcagccagcccagagaggccaaggccagacacggcacagggaggatctgaggggctgggagctatgtatagattgcagggctgctcttcccagactctggaagcgttcaagcactcagagagtcacgaaaaaatgatcgctttgtttgttccttgaagtataaaaatggttttatttttagacattatagtgtttttaaaaatctactggcagttgtcttcagatgcagccttgggaagtggaatggtgcatgcaagggtggatgcaggcagaaactttacaaggagtcaaaggtttctcagccacagcactgtgggcattctgggctggataattcctggttggcggtctgtcctgtgcattgtacaacgtgtagcagcatccctggcctctgcgcactagatgccagtagcactcccaccaccactggagatgatcagactttgccctgtgttcccacagtgggtaaaactgttctgaattgaaatcacttctgtatcctcaaagtcatcagctttttttcctccacagaatgcaaagtgagggcagaaaacacaacctttcccaaagctgttgcatagtttttcttcagttttcaattattcccccagaccaccaagctctcttgtgcccacctgccttccagttggccagtgccaccccccaccatgggggtgctgttcccctccgttctctgatggcctccatcagatgaaatgattctacactcttcctcccccctataacgtaataagtttagtgcacactgtacttgtcatgaaatatttgcattatatttaccaaatatatttcctttaagtaaaagtttgccaaatgtgctgcttcagcaggagaaaacacatttttactcagtgtttccacttagctttgtttatgtgtgttttttaaaggcagtgctaagaggacgtactcctcctgaggtctctgggattctatttttttgtacagcattggttttcttttacactgtttcagtatttggggttccagaatgagagcaaggtgatatgctctgccagcaggagggccctcgctgggaagcacctacatatcatgtaggctggtggtgatgcatactgagtggacacagcctcccacccatggacttgcaaacctctcgcacccagtttcagtgcacccccaaagaggaacaagaggcatttctcctaggaaagatgagctaaaccataaagtcaaggccaaagcagttgggcaacagtctaaaatctaaatgttttataagttctaaatttagactttggaagtggagtgtggttgaaacaagtggtatttagaagagcagttgttctaatacacagttctcatgacctcagcactccttgttcacaaccctttagtggctcctgcagaatgagttcagcctccttggcctggagtgcaaggctcctgtaattgcccataattgcctcatcacgtcttttcctccagccaagcttcctcactgtttgtgttccacacgtatagaaccactttcagttttctagatgtgccaggctattccacagctttgcctggaatgtccctctcttcttcccttctgcctggaaaattcctacttatcattcgtgacctatctcaaacatctctttggtgctacttttctgcccaatacctgtagtatattatagttctcataatttattggaattatttatgttcctttctgaatttccaatacatggtacaaagtagaagttccctgaatgaaattgaatggattaaggcatgatccttatcccaaagaggtaattcaggatgtgccattcttgagaagattttttaaaatcagttactaagttctaaattccagaaagtgcctagaaaattctatagtcttcacccagcctcttcctctggggaaggcctagataatcttaagcccacatactaagccctctgatcctgtggatccaaccaatacaagggtttttatcattattttcttccttgtaggctttcaatggtcatagcttccttggaactgttttcttaaactgaaattgaatttcctcttgacctttactctcctacctgagatataacattgacacacactgtttggcttcaagatgtgagtccaatttcaggataaatttcactcattgttatgctaacaaacccattagttctataaggttgtgttctgtcctgtgaatttggtctttttcctcctttcctttaattaattaattggcatctgagggatgctagaaaagaaaaaataccgaggacctcacagtccagtgagatagctaacccatctaatagttccactgcccacagaaggagcttccatggagacaggtactggaacttgagagagcctactggagggagtgacagcttgtgggaaagtctagacacagccttccagacgagggactgggctgtgacagtgagatccctagagaccagtggtgtgcccatcctccatgaccactttgctggtggtcatttctactcatcgtcacctttaagaaagacaggaggtgcattgggagactctgaacactttccataggaagcatgccattagaatgaagttttaggctaacactcagccattatttaaaaagctgtcatgaaagacgaatatgaaaggggggttcttaggccttgatcgatgctggcagctgagtgtagcatccacatgggaacacttactattgcctggaactcagccaccatgcccctttgatgccctcccggcagcagcaagttaattgttaagtcatattcatttataagatggagcttctcattttttttctttgtcttacttgttttccttcctttcccttctctgtcaagtcatctttgggaaggtttcttaattttcagaaagaaaagatcccgcaatccaagaataaaactaattataatgacaaactggccaaaataaaaaaatgacaaataatctgtgggctgaaattttcccaaaagccaagaataaataaaatgtcttttaaagtgtctggtggaggaggctgataaaagaactcaattatctgttggtttttttttttttttttttttgcaagtctgtgatatctgcctttaaaagggaaaaaagtgataaagtgtttaagagtataaaataaaatagaagttcatgagcttttgtgaattttgaggttgagagaaaatatagtcttagtaaaagagctaatgaatctgtgggtttgctttcaaaaatagcgtcattcaatccgcttcctctcctttatgttaaattacttcagttgcacaactagacacctgaccacctattgattttattagaactttaaactggtttactgcaaacagataccatactttgtttcccccaaatttgcctcatttccataagggactagaaaaaaacaaaattagcaaggagcaaatatttagaatttcaagagtttgatggggaatagggaaaactccacaagaaaataaaagagatctgacaatgccacacaggcatacgcagcggggtcttaccactcttaggtattatttgactttacctgggccctgtccaatctctaaagcccagcaaatgccccaggtgagatccttcctcagagaactttcacaggagatatacagccttgaaaaataaaagactgccataattgagaggtttgtgcaaggaatcctatcctagcactttcttcactgaagagcattttgggagcttttctgtgcggaaaacgaggagttctagagaatgcattatagttattgaatgcctacaagtataaccacaattttacttgactcttgagccaggtgcaagaaagagaacctcttccacctgtcaaggaaatcacaaactaggtgagaaaggagtagtagtcataataatagcaataataataacatcaacataataagagttgtcattgtgtttgctgctgtgtttctggtgccaggacataaatgtctgctcatgggtgtcataattttcacaagactttagatactgtttttgtcctcatcttacagttgaagcaactaaggccaagagaggtttaataacttgcctgtatcagctagctagtaagtggcagagccaggttccaaaggcagaagatttggtccagtgggcctgcccgctcttgatcacagggccacactgcttctcaaagacattgtgttggtccattcaggctactgtcacagcgtaccttagacggggtaatttgtaaataacaaaaatttgttgctcacagttctggaggctgggaagtccaaaatcaaggcaccagcaaatgtggtgcctggcaaaggctcacttcctgctccatagatgatgccttcttgcgtcctcacatggtggaagggactaataagctcccttggacctcttttataacttcagtaaccctattcattacagcagaatcttcatgacctaatcctctcccttcaaaggctccacctcttaatattttattgcactggggactatatttcagcatatgaatttggtggggagacacaaacattcagaccatagatgaagaccttgacactgctcatggagacctataaaaaggatttggggttcatagagaagagagtgacttgtgggagagttaagaaggacttttcaagcaagacggcatttcaggagacacaaggtggtcagtctaacagtagaaaatgaaatcagcagtagaaaacaacatggaaaattctgttcttaaattaccatgttggagagggatttaatatggctatgttttatgccagatttttttaaaagcctttcatgcataaaactatagtgatctatttagattcattaaaatatgtgcacatatatatgcatgaatttcattatgtggatatgtaaattaatgtattgggtgagagattatgttttagaatataaaccaaaaaccatgttgtgattaactttaaagaaccatctagttttggacattgtggcagttgtttttaatatccacaaatcagctgaattaggaaacataaactatatgtttggacttcatatttagagctatatgaggtcagcctcttcctccagaggcactgccagatgatagttgcttgcatggggcaacagtccaatgaaacaattaatccaaatctcattcagagatgagaagcaacttatttcattcactcattcattcattttcacatactcattgacttctattcagcaaatatttttcaggtagttcataagccctgtagttgactgtgtggtggcctggccaaggggcatattagccagagtagaagaggcaagagctgggtcttagtggccaggctgaagggataaagtgtgaggttggcccttgcagaagaaagtgattggacatcattccagagtagagtgcccaaaggaaagaaccaaagcatccctgatccaggccactgttgatgtcaaaaggggtggggcttttggcatctcatagggcgttcccagtcgtgacacattatagttctgaatggttcacataattaaggcattgattcgttccttaaatgaatcagaggaagggagatggaaatgattagacaggttgttttatttgcagtcacattagcaatagggttcaggaagggctcccattctgatgggagctttggattgcagaaactcttccccgtgagcccagcatcgatcacagagcttggaaatacaaactagagtttcatgagcaatggggaatcagagcttcttttaggatacttgatactgagtgtgcagcaacacactttgattggcagcagcctcccttccacagttgccaggcctactctgttctaggcactgagtgtacattatctaattatcatagcaacccagcaaggttgatgccattatcccattttacagatgaagagacttagcccataagtgagagaaccaggtttcaaatccagagttctgtgaccccaaagcccacattcttcctagtttactatgctacttctcctgagccattctgagcctcaatcacttgccagagagattggttcaggaatttgtcagggatagcctgaagtcccaaagtcttcagccagcatctgagcagtgttagaaaaggctgagactcacacgatgctatatgctgtgggaaatgtaatagacatgaacgattatcctagtcactattaaccaaatgctggataacatggagcacatagtgacattcaacagagttacattctctgccttctaggatcttgcaacccaaggtgcatatttacttgcttgaatattgagctgtgagaagaaaagttgctacgtttgtgcaagttctatttattatggatgctaaattcctataagttagctgaaccatccctagaataaagtactttattttagcccaagtgccaactgactgactgactgactgaatgaatgaatgaatgaatgaaggcatgcttgcttgctcttatagattaactctcttgctatgggtaaaccaaaagaaaaaaaatatttttccttaccccttaaagtgagtctactttgttttgtgggaggtagcaatttatagacctgtctacacattattttctaaaactcaagtattttggaagagcagatggggtaccatactgtatacactaatcatatattttgaaatgtatttctttttgagcagtttggtgacgctttatttagcaaaagcccttgaaagtttcaaaagcaacaatccaaagaacatgagtggctgagagcacagcggacagacagaccctccagcacaaggctaatgcttttcaaaatgtactgtggaccctggccctggcccctattcctcctgcccttagagatgatgatacacattgtcactgggggagggaacgagtggattgggcctgattatctgaattttctgtgaatcccctgggtgactgtgatatgcacccagggtggagaactagccttctacactcatatctgagtgctactcttcttacctcattctcttgagactcatattttcacttataaaattattagagaagcaaaagaaaaccccatcccttttacattttctgagagccacagggggagcaaataggtgttgagcacctcctacattgccagaagtttgacttatagatctggtttaatctgtacaagaactcaacaatgtttaaagaattaattggccctcagatatggagttgagttatgcatactgctcagttcatagcttattgtcaccctaaggccatgcaagaccctcctcttattttgttattgttcctcttcaccccccattccctacacccatttccttccctcctcagagaaccacctaatatgctagaactaaaatgaatgtctttacaaaattatatattatttttgtgtgtgtttgttttaatttacataaatgataaatctctgtaatatagactatatagaaagtaagaatgcttattttttcactcagtattatgttttcagatatatctatgttgtataaacttcccacatttgcataatatttcattgtctgcatttattccattttgtttatatcttccccagttgatagacactcagctccctgctaccacagagaattctgcagctaacatccttatttgtgacccttggggacctttgtgagagttatatctgggatacgtgtccaggagttggatcctggggtccagatgtgatgtatgcctctttaatttcagattgttttacttaatagaaacaaatcagagttcccatctccttacatccccatttggtatgaaccaccttttgaattttcatcattctgatgtctgagagtgacatttaattgtttcaattcttatctcctggattactagtcagtttgagcatcttttcacatactttttacccatttggatttttccttctgcaaattgcatttttatatcctttatccaattctctatttttctaatattctaggtgttaagcccttgtcagtttcagaggttataataatttacttcgtttataatttgactatttatcaataatttcttttttgaataaaaatccttacaatttaatgtagataaatccagcaactttcatctgtggttagtgatttaagtatcttttttatgaaataattttctactcaaaaggatattattcctgtttttgtgaataaggtagttatttcttattcagtactactgcccaaggtcacactactacctagcagcaggatttgaaactattaataattacctgttaataaattaaatcatgttattcatattttaaaagcaaccaagtattatttgcactaaaacattttctgagttttaatcagagatctcaaaaaattgcaccctgcagcttctatcagtcagatttcactgaattttcctttctgcccctaaattcttgcaaagtatctcaaatcacattacagccaggctggttgaaattacagctttggccctcattaagctaattaccacttgtacccaaattgagccatttcactccaataacactgtaaaccagtccttcctctgtgatgtctctgccttgcctaggaaaatgtgaggctgatgtcagaattttctgtctccttagagcaggaggtttccagctatttctctaaggagctctgggatgcagctcaagtgtttgataggcagtgtaagaggaatgagggtggaaactggggaaccagagggaaggctgggcacaggccccctcctcaatttagcccacacaagtgttgccttcttggttttgtactttaggcactatgtaagtaaaatctattggaaaagggattctactgctaaaaggaatgggggagcttggaagcactgtcttaaaaaactagactacttaatataaactgatttattttcatctctctgctcatgttacatttgtatagtgttttacattttggaaaacactgttacattatttgagtttataaaacctgataaggtaggcatatctcaaccactatggcacaatttttcacaattaaagctccatatcacagaatctgtcccagcaggtgactgaaaggctgcatctcaggagtgtggcagggattatcaccggcttgggtagaagctggacctagatgatccctaatctccctgctcgtgcaaagatgctatgactggaaatgacgagagaggaaagttaacaccaaaagaattacctaaattaaacctcctgcctattggaggtagggatgatgaaattcccatgtttatggaacacctgttctggtctggtcatccaggtgccgccttccactgaatccttacagcaaccctaggagagaggtattgctgtatccattttaaaggtgacaaaactgaactttataaaactaacgggaaaagcttagatttcctccctgagctcgccagctcccataccactgtctgttctttccactcacaaggatgaccccaaataaacaccacatcagttagccgcccagaaccttatctaggcagtggctgtttggggaaggaagttctttataagtacttctgtctcacactgggcatcacgttgatgcttacatcttttccaatgctcacctcctgcctgggggtcaagccacatcatctctggtttctggctgcattcatcctccttattgatcaggtcactcgctgtgactcagctgttagcatctctcctgctttgatatcttggattgccaacacaaacccatgctatttttactttgcctcagaaaggaagattggaagacagcagtccagccttctggtttaccaagttgttgattcttcttggctttctccattcattcatgaattctttctgtacttcaagccgaaaagatgtgtgtggctggaaagccctttgtggtggatccatctctaaggcctgaatgggggctgaatgtgatcacagctttggagatctttgctttctctcttctgactagaatcctttacagtatgaaatcactctttccccctcctatcttagataaaagaataaacatattgaaaaatgtggctgagaaattttgtttcaaatatgcatatattatgagtagtgttctgagcaagacagaaaaattaccaaaaataaatgcatgtaagcttagccttttattagtagggctgattgtttaagaaaccactttgttagcaccaggcacagtgacttgagcctgtaatcccagctcctcagggggctgggcagaaagattggctcacttgaagccacgagttcaagaccagcctgggcaacataacaagacccccatctcttaaagtatatatattttttaattagcaggatgtggtggtgcacacctggattgcttcaacccaggaattcaaggctgcagtcagctatgatcgtaccactgcactccagtctgggcaacagagcaagactccatctcttaaacaaacaaaaaactgctttgctaaatgaaagctgtatggatttcacaatttgaatttctgaatttctgaaatcttgcattttataccagaaggcagtttactcatgtgtctgatcattctaaaccaatggagagttaagaatgtacatttcatttcggctgggtgcggtggctcatacctgtaatcccagcactttgggaggccgaggcgggcagatcacgaggtcaaaagatcgagaccatcctggccaatatggtgaaaccccgtctctactaaaaatacaaaaattagctaggcgtggtggcccacacctgtagtcccagctgctcaggaggctgaggcagaagaatcacttgaacacgggaggcggaggttgcagtgagccgagatcaggccactgcagtccagcctggcgacagagtgagactccgtctcaaaaaaaaaaaaaaaagaatgtacattcatttcatatagtaccttacgttgtacaaagtgctttcatatgcatgatctattttacgtaattactctatagggtaaattttatcatctctatttcatataagcaaattaagatgcgaaaagccttaaactttctaatatagtactagtttaaaaagcaaaggacgtttagtttgcagtcacctagccctaacacatacaagtaatttatttctttagctacaaacaatactaagttgatgaagaaataatattatactttgggagagctgattcataagaattgtcattcagctgacactcaggtcagtatcaaggaggcaggattcatggaagtaagcagggtttcatatcatccgtgtgaagccagggctcttatttgtgaactgctttccttaccctttccttacgctctcctttcaagatagcttcctgtacctagctgccactggccagtttcagtcaaagccccagcaactttccaaaggtagaaaaacgtgcatgtgcatgttcacaaaatatggcacaatttcagtttgtttgtagaactttcaggtaataatccttgctttaaatgggacatggagttttaaaactccaaacaaatctctgaactaccaagtcctatattgagagactgtcaaagatcctaccccactgctgtatgattggaggattctagctaggaccacatgctttgttatcagcacaagtcagtagatcagcaaacaactgcagtacccagaaactatagcatagggactcattttaactcttgtatacatcactcaaaaccttttcctcatgaccttctggtttgcctgtttcacaaactcctctccaaactgtcctccaaggtggggctagtagaacacatgttcaggctttgttattatttgttgactcgtatgtggcgtttcttgtcccaattcattacataaggcaaagattctactgtaaggacagtaagaatgttgaacacacacttgatcttccactgtatcctcggcttcagttggtcaaactctgtgtgcagaactcaactcacttttgctatcacagaaatataaacattctgcaattttcacctccaaattttgcctctttttacaagctctatgtaatttcctgtgaaacaaacttattaaatacattctattcccccatctaaccttgttgacattcctctcctctaatacaatagcctttcagatcaacagggtccccaaacagatacagagatgtattaaagttttctgttatttagtatttgctgggtacttgccacatactaggtttcccttgaggaacccagtctaatgaatgtggccaatgtgaatttataaattacacacagtgtaattaacatagcagcagacccagaatttcatgttgtgcatgctccaccgttccttgtctgatggggtgagtcgttcacttagagcagtacccctcccgagcagtgtgctaataagtgctttggagatggatcctcagataaatcttgactttgagatcctttcacagcttcacaaagatacacaaaataagctttatagtgggaggtagaagtgatacgtgccatacatatacagaaaaacagaggaaactaatatttattgagcatatactgtgcaccaaaaattcttttcaacactttcacttatgttatctaatttaatattcgtaactatgcttgaggcagatattatcttcagtttacagagaaggaaattaaggctcagaggtgataaataacctgctgaagaaatctttgttccaatactcatgctatttccactctatatcactaaaatgccttacaaaagatatcaaaataataaagtgagaaagaatatgacccatttagtttcagttttctctcgacttcattgatctctttcctcctttctactacaggtaagtagatacctgaaacatcctaaggggttggcccttaggagctttaactattatggatattttagtaatttcaaaaataaatccgtttggatttggcccagcaactccctcctgtctttctcctatgatttacacagtctccgtcagtactcatgttggagataattaactgtgctgcctttctaaggtgtctttccataggtgtgccatcctaagcatgggcattccttaaggagagttgggcgtggcagcacctttgcttgtaatcagggcctctcataccctttttaacataaccactgacaaaccctctatagtatcctttcttgggtgggaattattacagctccagtacatctatgcagtatctcagaagttgctggatgtactcactaaatgacccagatttcatctttctcacaatttaacactttaaataaatgccagcaagcttcaccgcattagaagattactatatgtctgaacaacttggatatcaatatttgtcatgcagccttcctcggtgtaacatctaaagcaatactcatttagctgacgtacattctctgcatggtgtttacccaacagtcatcactcatgtttgctcatgaggtgttggggtgatgagccgagctgctgtattctcagctgggcctggagcctgcttagtttggcactgattaatgatatgtggggactgattaatgacatgtggggagcaggctgtttgcagagccaccttagaaacccagttagctaaagacaaatagctgagagttggccgatgggagcaagggaggtgggctcttgagaaaggagagtcattttgagagatatcagcatgacttttggtgatcttaactagaggaagggacagattctgcagtagacaatgcttttgggtctggcttcttggtagacaccccaggatcaggtctaaggtatgttacccatgtattcccataacagcatcatttctctgtgctttgagtttcaccatttataaacctgcttaaagagcttatcttcttcctaatcataccttgagacaaaatgcactttataccagtaaagtatcatgagatgttcgtttggaagccgttatgccaaaagagcaagcatttacagccttgctttttatttaccaagtgtattttacactggaaaaggtttcaatatggccccatatagtatttattttgccttatgtccttcctatgtctcgtttttctttcttatttcattcacctactgtgtcatgttggtttggcatccacttcttttctaaaattgtatcttttgtattttttattctttaggtggggcagcgaggaaaggacgcattgatcttgaagttgtagagataatgtctcagcaccctgcttggggtgccatccttttagtggcatggcaaaaccaagcacaaaatattttttattgtcctttccagaatagatccctttctccacagcaccatgtgggtggttgttcctggcagagaacacctttctctctcatactgtaagttccgttggcaactcctgaccagggacagtagcaacatcgatttcctaaagatagatatcccctcgtttagaaggcattttctcacaagcttattcagaatactcaagtcagaagttataaggatgtccaagctcattttgggggaaaaatacagagaggtgaaaggatgtgctgaaggttacacaggagcagtaggaaaagacagacacaaagccagggaggcaccacgtgtcctccttaactgttcatctttgactgtatagcttcattcgtctgctctaagatcttgcatttccagccatcgtttatatctggtcctatcaaagctcgttgaccaacattctctcttttaacccttcccctacagtgcaaggtctgcactgtacactctcatttattgggaatctgagacctagagaggtttaggaatttgcccaaggacacacagatggcaagtgagcaagccaaggatttggaatcagttctgcctgattccagtgcctgttgttttccttccatctttcactagagccaaactgatcttgagcagttgtctttccattgacctgcaaagttctaaccactccccttactccactttttagattgagattatacccatcctgcaggacccatcagagcctgctttgttcatttagtgtttcccagccaccttgaaatggaagtggtctttcctcctttgaatcacatggcactagagcctgttcatttggcaccagtgcctgcaaagcagacagcctggagcaggtaggaatagggagctctaggttcaaatccctgctctgccactatatggcgtatgattttgagtaagccacttaattctatcttggcagatccatcaaccggacctctaaagtccagcttagccaaaaattccaggattcaaaagttattattatattattgctaataatattgtgagtgtgagttgagttctatactaatctgtgcctccctcacccctactttcctgttatctatgcccacctcacccctagtttcctgctgtctatgcaatgccttacgcagaagaaggggcaatggagtattgataagagacactttttgatcttcagttgtaactcactcccatttatttgtctgtttattcatttggtcattcattcatttatttattgctggcattgaatttttctattacttcccaagattgtttctgagatcttctggaggcctcaccagtactttgggacaatatggtcataggtttggaattaaatccttgaagaaaaagactttccattttttaaatataaccaaagcaaataaggaaaagtcactcttacaatgtgagatatcagaaaacaaaacttaggcaaataaaccaaaaatactttgtaacattttcagcattacagttttttcagcatttaatcagtctttgtgtacctgtacgtacaagcccatagttaccaacccacacacacgaaaaaagaaccaattaatttaaatgatcaagttcatgccatgttcaatggcgcatgtccccttttgctcctaaaatctttgatcgctttttagcttctacagttccttgggcattcattgtaggagatggcagttctgcctgccccatcagcagacaccattttgcaaagcagaaaccatctttgtcccttctacccccagcaaattccctggctcccagttttcacctgtcagatgtccatgctaattccaagactcctttatcacaataataacagaagtaaaattctcttggtggatggatttcatttataataaacacctttcttatttacttactacttgagtgcttacttactactcaataggagctatgcattactcactaatctttttaccaacttagtgcaatagcattcattaatcgtaggttaaagttaaaaacatctttcattcaactctcacattctgaagtcaacttcagctccatgtttccattgtaatagtttaaagcatatgctttctaattacagaacttggattcaagtctctcttctgtcatttaccagtataaatgccctgagacttgttttctgcaactgaaaaaaaaggatagtccctatttggtaggattcttgtgacaatgtaatgagtttaaagattccaagcttagagcactgtgcccatgcttagtaaacacccaggaaatgctaatagtcagcattctgttgcctctagcagataggaggtgctttatatgcacccaactcacttgatactgtacctaattaggtgggaaaaagggtgggtattgaatttgttttcagtttttaaacatacgttttctaattcaagatgagatacatggtaaggtccaacataagatgtacgctcttcttaaataagaagttgagaactgccattacactatgtagtttaaaatttatttatttttgaagccggctttgattgtcactttacaagatgtatgccgttttttcccttctttcacactatcttaaaaaaaaaaataacaaatcttaacatggcattggctttgctatataacaaaactctaatacaaattatatccttttggaaatcattttgtttttaataaacaagtagcaagaacatttttgatttataaataaacattacttctaaaaaatccttagtaatttcacccaaattataattctaagaaagttccttagacattgattatagtcagagattttttttctagttacaaaatcattgaaatttgaaaagaaggaaaatggtggttgtgctaaacatcagtaggtctagaatttgttcactatttcagtttattcaacaaacattcaacaagctccttctgagctgagtgcttggcactgttctaggacccataactatgtccttacaacaaccagcacatcattgtcagaggtgttagtattgacttcagcagccaagatgggaagtgatatagaaattctgtttagctgttgggtcaaataattttcacaaggacataaaactgaacacaagttcaggcccggaaaaacacttggattagtcctcaaggaagtctagttagtgcttattgggacttctaagaaaacctgatccaaagttattgacccgtcctgtgtgttaggtaagattaactaagtgcccaccaacataggagatggaggatagtgccattgtgaatgccaaatttagcggattggtggtggctacttgcagacagagtccaggttcagcagaaaaaagaagtgccgtgatagattagtgatgtctgccattggcatgggagagaggagtggtgggatatgtgccacataattgttgtttattctgtgtcctccaaaggactcatcagtaaggaaagggactgcattcgggtgagagaatgggagacccagcagatttctggaaaccattgcaataactggcttcacagctgtgagaggtagaacagaggagcagaaaggaagagggatggagtggagaaacacaagaaccttttcagatcttgcttggggtcactgacttcacacgactgaggaactgtccaggttttgcagagtcagggcactctgggctgttttaattgtctgagttttgtagctgtggtgggtgacaggttcccctttaaacataataaatggcttgcaattactttactttggaaagcactcttctgccctgggacactgtaataaccagccatagaagagaaaaggcctagggatttatgagggtgtcccaattttcaaccatttgggagaaatacagcagaacattggtacagcagtgtgttagtaagagttaatctatcactgctcctctctcaaccctctctttccctctgcttaaaactatcacagggattcgtccctggccttcatgaagacttgccagaatttttttttttgtttgcacataactctagaaatacaatctagttgaccttcagtttctggaccaaaggggacattttccaggtatgagggattttaaaattcagtagtcataaaaagacaaatgaagcatggtctcttcctttaaagggctcaaggtcctgctggggagacgagtagtgaataaataatttcactgcactctgagatatattgttgttaaagcaatagggtaagaatggacatatatttctaaaagcaaagaaacggtgtgcataataaatcactttgttttcctgcccctaaattgtattgataatagcacttactgagatctactcttataatttgtttacacagcaactttctaagcgccttttttttttgggaggtcttgcactgtcacccaggctggagtgcagtggtatcatcatagttcacttgcagcctgggctcaagcgatcctcccaccccagcctcctgagtagcaaggattacagacatgagtcactgcacctggcctcacctaagtgcttgagtttctcagcggtggacactggtctggttattctctctgctcccagcacctcctcacccagtgattagcacatattagtcttggtaaatgttagctgagcgaatataggcctgagtatacttctaatgcttctaacataataccaggcatcaacaacttattagaaaaaatgtagacaatcaagacatatgtattgtttcaatatttcattaataattcagctgaatgtatttgaaaactaaaatggtgttttcaatttctcaacaaagaatgggccacttaaaatatgacacagtttgatctgtgctaaaagggtgaaaacataatattttcttgtatatatcacagaatcttgacgagtaggctctgaagttcaactttgtggccacttccactgcctggtctgtctgttgaggcaagttcatgaacagtttcattttggttgattgtactctcctcccagggtgatttgctggagtggtcttcgatttcctctgagttcagcagccttgcctgatggcagagctggtttatgggaaccagacctgcttttcctacctcatttcccctgtggtcttgcttgagcagtctgcttaggaaaagtttatcaaatctcctttccagaggggcaggttttcccatttcatttgtcactatttaacagcttatgcaaaacaggctggcagttctaagtttgtggggcttcgggttctacccttgatatgagacaatggacttttcatttatttctttgtagtaactaatcttagaggagttcaaggctaatttatctgtatccactgatattcctcttctccatcttctgtttagctcattcattcattcactccacagatgcttataaaactggtattaaataccagaaacatagagatgaattgggtaaaacccaatattcatagccattgaggagagatcaccacagtgaccactgactccttcttttcaggccataccaatgagttgagtgaagaaggggcagtgattgagtatcagatctgttggtaaacaccctgaatgttgaaagggatgcctgtggatatcatttattcattaacaaagacgataaggatttgctaaccattcctagcatcttgttttttggcatcatgattgtgtaacttggaaaagaaaaatccatccagtctcaggtacttcttcaatggaattcctcccctgattttggggagctcctagggaagtgaattcaccatcccctccccaccaaggacaggcagaacttaggtgcaagaaagcagcaccccaggagttactccatgtagtttaggagaccttccatatgggagggtcattccttgtaactacagaaggatttgtaaaaggctttgttttcaccccatgtttggcaaagtatggataaatttgaacaggcattagaaaaaccaacagtagcatgattattaaaaatttgtagccattttctcccaatcctgttggtgaaagagttttccagaaaagaaactctatttctttctgcttttcccccaccgtgtctcctcaaggtcacatgtttggaactgacttgcttgacatgtttatttaaagctgtggattaaatgccacccactaatgtgatttgcttgggctttgcctgaggcaggctccattagacactggtgaaaatagcttcctgttgtccagccaagtccttcgattagctaaccagcaaatttagcccaattgctgtatttcaatttgactctctatttaaatggagaaaagcagctttgtcacatggctgtttgcctcttgatctctcatctcaagagcagactgcaaagagaaagcgacgaccccaaacctcaccttttctgtctcctcttttggatcagctccctgcagatgctaaagaaagtgagaaggatgttgcttgcataaacattgttcttcaactgagcactaattgagtttaagatgaattgctggttaacgtttttgcttatttatttttacccattataaagatgccttgagccttaaattaaagtgctttctcatgaggtgcagggcagttattcatggcctgtgtctgagtcttaggagtgggacaacacccagtgagcacctgtgctgaactgcagggtaagacattgcataactagttatttagggggctaacaccaaggccctcaacactcctgttttggattatgatcagattctcaggatgcttgaagctgcctgagcaccgctatcccctgccatccattcctgtttcattagaagctgcaaatccaagcaaggcagtggcagcactgggagcagctcccttcccaactgcttcagtgccatctgtttggctctcgaggcacatttgaaaagtcaccttttatactttcatcacagcctgtccttaggttctccaggcgctgcctggacactgccagccacaagcctgcctgctcagggtgggcactcattgctgcccagctctgatggagattctgggaacactgaccatcactgctgcccaaggaggtatgggctactttggaagatgttggctgcccttgctaaagcaggtccctacacagtgcctgatccaggtagcctgatgccctccacatgcttctcactgaggcagcccagggggagtggtctggcctcaagtagcaggtggtgtctgagggacccgcccaagcaggctgagagcaggcacagtcccctgtccgccaatctgactgtccccagtgagagtaccaatcctatccgtgctgtcgggagcagttgaagatcaagctttaggaaaactgtgggcagtaacaagcggaggactcagctctttggttggcatctgtaagtcacattgggcagcacagagggaagggtgcaggccctttctcccttttcgctggaactgcagtcattcctccttcctaccttcttgtgctgcctaattcggaccagtgttcctccaccctagctgtgcatgcacctcccctggagagctttgcaaaacatgacccatgtccagaacccattccagggtcagaatctcaagggatgaggccaggcaaagacatcctgtgaattgtattatacagtgaatgttgagaactactgattttagaggctatttctttctggtagtcatttgatgagcccattattcataaattaaacagataatttctcaatcattactctgtgactggactgtgcaggctctggagatgagatagtaataaaggagggcacaggtcattacattatggtacagtcagtgctatgatgggactgtgatgggagaatggggacaggaaccctgactttggctgaagtgcagcaggtcaggaagaatgataaagggtggtaacatctaggcctaggcttgacaaatgagcaggggctagaaggaaggtaatagtcatggataggaggaagggcaggaatgaaggcacaggagtgaagttcaagcactgagagaatcctagtgagacaagattgtggggtgcaagggcttggccaggtaaggacgtctctgtgagatgggcaggtagacggcaatgcattggagaggctggccttcacccaagaggcaatgctgggcccctgcagggtttaagcaggtgaatgatatgatcagctttgcattttggaaataagctggctggagtgaggaggagctggaaggggcacagttgaagtcagaaggttgttgggtaaaccaggaaaggcaatagggcaagggtccagggagaggtcaatgagaatgacatgaagtagaaggaacagatattcaagaggcaaagtcaacatcccaccactcctgaaaactctgatcctcagagcagaattcctgactttcgtcaacatgcaggttcccaagctcaagaagtttcattattttgatcattgctacatcacttgccatcacttaccaaagacaccctcagagttacggatggtcacaaatccaggtatatggcacccagagaacaagacttgggttgtcagtggtttgcattcaagaataactcaggaagaagaaaaccaatagagaaagtttcagtctgctgtggaccattatttttctcatggcacttaacttcgtttttgatgtgatgccccgtaagcttcgcattggttgggttgtgaaatgccatcctacagaggaggacttacaaggacctcactgcccacattaagcacagcactggctttggctctaaattaggtctcatcaccccttcagacagatgctcacaggagcttagagctcagagggccattagggacacactgaagaaacagaggcaggagaagttaatgacttgctgagttctcttgttactggatgccacgattagaccacacatcctttgtgaaatgcagagaagcttttttgcttttattaatgaataaagtgtttcaaattcatctggtataattgaggacacatgatgaaattgagaggagccagaggttgcacactggctgagctgtgatttcaaagcagtttctctccatttacattaaggctgaccccacaggaccctagacaaggaggcccttcaccaggggactgcagtggtggaaccacagtgagaggtgaggcagaaaagagcaaggacaggccagagcatcttccaagccctgaaaccattcaggcagagtcgagaataccatttgatgaaaacacctctctttaatctgtcggaaccgattctgttcgatttgtcctgaatataatcttgaaccaccctgcatgtattataaaacacccagagtcatcttgtgaagatacgtaagttgtttgcaagctgcgaggggattattttttttttggataagatgtctaggactgtgattcagagggaaccttataacatattgggtgcaatgctctacatctcttaatcctaattaaagattattaccgctactttatagataagaaaaccaaggttcagagaagttgagtgattttcccagcttgtaagtgacagaaccagactttgaaatgacttctgcctaactataaagccaggtgttgttttcattttacactaggcattggcaagctactgctgcaggccaaatccagcccaccacctgtgttttgtaaataaagttttattagaacacagccatgcccattcacttatatattgtctgtcattatataagttgccatggtaggcttgagtaattgcagcagacactgtatggctcacaaagactaaaatactgctatctgcccttaacagaagtttgctaacccctgtctaagcctcattgtcctaaaataaattcagaaacctcaactgctactccttcagcccagacagcacctttattttctctctccttcattttaatatgcacgacaccactcagcaaaatgtcctgcatgcatggcctggcctaggtactccactccctgatctggcaaaactataaagtgaaactattttgagtttccggaagctgacccaattttaaagacctctatatggaggtaggccagggagggatcaataattgtccctaccaggtaagccatcagtttgtaccctcacttctgacactttttctgggcaaggccatttctccacattgtacccttagagtgtagccccaaagcgatccctggcctctgggaaattatccttcccacacatgagcacttagggtcttcttcccccagacccctctgcaggcagaatctttccaattctttggttgttgtgagccttcagtccttttgttgtgcgtaaggaacattcctgggaagaaaaatggtccagcaataaagtctcccccacatgagtcatttttagctagactgggttggcatctgtttttcctaagacagccttttctcgtcactgtgaagataaatcaatttaatggacaccactggttgggggtagattgtactttttttgtaagtattgaccacccattagtggcagtgcccagcagcatacaccattgtaccttctccagaaaccctccacttggctgtagatctatccccttccaactctgccctggaagcaagcccaaaatgacctctggagccctaagatgccatcccacggccacgggctttgttctttggctttgtgaaagtgtgctttataaaccttgttggcagactcataattctgctaaggacttatttgttgtgtcaatctacagatcaaaggtgggagcctaaaagcctttgacattgctcataccaaccatattacactctgggatacattgtattaagtactatgggccatcatacaagtaagaaatagttcctgccctccagggacttacaatctagacagcatgaaatgtacaccaataactagcttcactgcttgctggtgatatgacaagacttgctggaagttgtagatgccatatggaagactcagaaggggtgctggatatttgctgaaatcggtggttctcatacttgagcatgcattaaaatcacctagagagctgttaacacagattgctgggtgccactcttagcatttctgattcagtagatctagggtgggcccacaaagttgcattcctaccaagtggccagctgatgcaagtgtggcccaggaataccctgtccaaaatatttttataggagaagcttcttacatatgtaatttccttctgggattgtaacagaactgacatttgttgagtgtctaatatgttctattcagtatattaggtactttggctataatattttctttagattttacaaccctgtgaatttcgtattattactagcactctacaatgagcaaactaaggcttagaaggaggaacttacatttgccagatatccagtatgtaccataaaggatgtggggcattatccaatttaaaactttttgaattctaaatgattagtactcctagtttaggagtggtaaaaaaaaaaaaaaaagatgagtaaagatagtaaaaatgagtctgagagagattaagtatcttaaggaaggtcaaagccccaggaaacatgcatgctggattcaaaatcacgtgttgggttctaaaggctgagaagccatactgcagctagtacctgtctgtttgccaaaagctactaatgtagattccaaaagcatgttttctttcatgcttgaagcatgtacttcctacctccttgcctttgctcatgctgctccttctgcttagaattcccttctccctcttcttcacctgagtaactcccattcatcctccaagcaaaatgttgtctcagccatgcagacttctgtaacatcccctccttgcctcaactagagcaggaataaggactactttgtaagcgtcccaacatactttatattatcaaattccttcacagaccccaaagtcctctagtgacatatccttggttacagaaacaaaaaaatccaaatttttcattttagccatcaaagccatcccccatctgactcaacttgcctttcaaccacaccttgcagctccctcatttctccaactaaacaagaccgctgaacacttccccacccatggctatgttctccttccccctccaagccttcactcaggctgctgctgtcaccaagaatggcccctcccctgcacctcagcctgtctgcatgtggcctttccaccagccccagctaaagccctggtgctatgccctcagccctttgggagggcctccatgagtgttcatggagtgaacacctgaccccttgctcccctgtgacatcgcgtcttcccttgggtgaggcaagtatgtgtctttccactgtcccaggctgagagctcatccggcacagggcctccagtgtcgcgtcattccttgcactgagtaggtgctcacaaaacatttgttgaagaaatggataaatgatgctggatgaaggttgtgggttaaaggcaggatgggagaagtgattagacaaggagcacgtggagcctcagtacgtcttgcaataaaacacaggagcgcatttacatgaccaacagtgagagcaggggacataggtggactttgccagaatgcttgattccatttaggaacctcctgtgcttgtacctttaacccggtcttccaaggagccaaaaggatttctccatttgaagtacaaatgtcttgtgggactctcactttttttgtaatgtgtaacattattacagaaaatatgggctaagaagacttcagaaacacaccactgacatggtccagacatcgattgaatgatggggcaataccaacaacaaatgcagattctaagagcgtgctttctttgatgtctgtgtttaattccattgattttctgatgtctccgcaacaccgtctgtgggtttttcaaacaaatggtaaagggtgtgatgttttctaaagaagatagagttaaggatggtggttgtgaatgtcttgatttgtgaatgtcttgcacatgtgaaacattaacagagacataaagctatcagttgtaaaccttgtagctaaattgcaaaggcacagaggaatgtttgacttatgtaactcttttgtcttcttaaaaaatttaatgatacctttcacagaggttattttccttgacatgcagagtgaccatagaacttctcagggctgttggcaacaaaactgtgaagtgaagtaggtgaagctagtctttgactccaccaacctctgtcctgtgctttatacccactgcttatatcccttcctctggggccaggtgcctgctttttccttctgcctatcaacctagtcttaggaaaagttctatactttcttcaaactgaactataagtgatttggggaaaattcaaaggattgctctacttatgtattcttgcatctagcaaggttcaaagtcttaagctagaggaatggggctctaggagtggattttaagcctaatctataaataggagttaaagagttccccacattccataagggatcatcatgatttccttgcagaggtgcacccatgagcctgtaaatgcaggcgatttttaaaagtcacttgttgaattaactttgctatttccatccagcttccttctcctactcctccctttccctggacaatctcagccccacagctggtcctcctcttggacttcaccatatgtatttgttgggattctttggttgcacgtgacaggaacaaactatcatccaagccatcttacaaaaaaaaaagaaaaggctcttgtaaccaaacaatgaaatgcagggcttgagtcacctttacagttgaacaaggcttaaccattaacactctttcacacacacacacacacacacacacgtctgttttctttgtcctactactgacattggtctcattatcttcccctttcctatatgtgaagggacatagtctcacagctctcaatttgagggaaagagagcatgcttcaggtctgcctcaagacgtggcagaaaagtctggggaaggattttgattggtcagttcaggtcacgtgcccacttaggcccagtgctgtgtctaggcagatgtggtgtaaacaccatcatctctgtgacagccccttaagaaacacatgacatgagggaatcatcttcttcatctgtaaaatgaggggagtggaggtcactctataactcttagctttaacctgattctatttaaaaatcatatcttcatttttggtattcttttcactatatctttgtctctcaccatgtccagcctcccacaagaaagccagatatcattgggaaacagtaatgatctccttggctcaattctaagtctctctaagtgggcaaagcagcacccctatggtgcccgtcatatgatacagcaaagcattatagttcaaccttgaccaaatttaatcatttatgccacatgatgtaagatgatcacaatttccaaatttgtcaagcatcccaaatttggcattttgcctaagttaaaaaaaaaaaacaaacaaaaaaccagcagatctggtgaaagatcaactggaaatttgcctgtatgacattatgctgggggcatgaaacaatgcttatgcagttcgttccaattcagatgcaacccaggttcaaagcagctaatacacagtggtgttccagattatctgtctatttccattcccatgaaatgtcttcaatgaaaagcctatctacctgccaacagagtccatcagtctgtcatctctatcatttctgcacttctattataatgatccttggccatgtccacctttcttatgagaccattagttcacggaaggcaagaaatatatcatatgcatattcgttcaacatcaaatctatgccaaatccatcttcgtgggttgcttgggatcctaggattcaactacatatatgtgacttggggcaagtcatcaatcctttctcagtcggtttccttatcttttacatagtgatactagcacctcctccactgtattggagggaggattaaataaggtgataaacagcaaactgcctagcacagaattcaacatatagcagggtgcatctgtggtttgtcttatttttaagttcccaaatgacacgaagaatggtggcatgggtggcagcatagtcgggtgtttacaatcctgatatccagtcccagttcagccacttaatgaccaatggtatgattttgaagtttcttaaagtttcaaagcctcagtttcttcatatgtaaagtggacttgatggtaatatctacctcataggtttgagtggataaagaaagaaaacatagataaagcacctaccacagcatctggcacatagatacctataaatggtatcacttgttgctatcacctgtaatggagagtgaaaaaagaagcagcaagctctgagatgcttctgtgttttttctggtcttttcgtgctgtatgcgtcctgatgaagatgaacccacattaatagaggcagtggttaattgcctccttgtgggctagcactgtcctgaggcagaaaattacagtattcttcttttttcttgaagcttccagtgggatatgtctgttctaatttaataaacctctttttttagtgccaggctcaaagaggcaatatcacatgtacatttccaaatgcgtaattagtatgaacactcaagccctaactacatggcgaaagcagtctgggagaggggagtgtgagtatctgttcacattcatttgaaccagctccagccaaacttccacagttaattgtatctcagcgattttctcctggaaaaaaataattactatgcagggctttagctgctgcttggccttcgttcattcctgactcttgagttagcattgtttacagtgttgagtcagcagcagtcacataatgtgtcaagcaagtggagtacacctcccaccctgagcttccccaccccaccagttccctgttatcaatccatttccttccttgtgttccagcaatgcaagagaaaatggaagatgggcataatggaagttgactgttttggaaaagcatgctcaaggttaatgctgagcatgcgtgcagagggcaccagggaagcagggagcccttaactcggaaagacttttctgaatgggaaaggtcagcccccaggaaaatgatggtcttcctttcatcttcaggtaatgcaggtggtgaaggagcaggttatgagagcacttacaaccaagcctagctccctggaccagttcaagagcaaactgcagaacctgagctacactgagatcctgaaaatccgccagtccgagaggatgaaccaggaagatttccagtcccgcccgattttgtaagttacctagtattgacttctatctcccaaaagactctaacccactatttctagaatgaccgcctgtcatgaagctgggctgtgttgtgagctcctcagggaaggccagcagaagacattccaagtatctccatttagttaggggagtctcagcagctccttgaggaagggctgggctgagtggagtgggccagttgctggaagaatggatctaaaccaggagctggccctgttagtgacaagtcctccagggatttgtagattaaaagtttggaccttttccaacacttggaacaattttttttctctttgaccagtaaaactatatttcatgtgggtgccctttgaatagcaagaccttgtgagccagccagagtgaggcccattcattaaagcactatgaaaatgaaagtagcatgaatctaaatgagtgggagtgagagcttgagaggaagagagtgaactacctcctctttgccctgttggcactggttggcatcggagcatgctatatggccctcatgactgtgaacctacattcctacagtggggaggcagcaagccccacttcacaggactttgcaaggaatgccacttgcaaccattgcaaaatgtcatgtattccaatctttgaagtgttctgaactcacacatgaggggtattttgcttgcttcatcttttcttagaactgctctgtttctcttcctttctcctgttctaagagctgggtcaattttgttacccgtatattttaaagaggaaaaacacagggaaaggcatatgtgtttgatatttattctcattttgtcctcagaagactggacacagcttcttctgagcttttgcatgaagccaacttgtaacatagttttaattctgaaggcagtgctcccccaccacacacacctgctctctttctgtttctgattctttccctttttgtttgttgctctccagtatttgacacttctaatgcttggcaatttgtaatgcacccttcttgctatttcatttctttacgtccctgtgagatgggcaggccttactcccatgcaaaggctaggataggcaggtcttactcctatgcaaaggctagtctggaggggtgaagaccatgccaacaagtggaagagccgggactgagcctcgagtctactgacccctcagctaatattgtgtttgccctgccctagcttctttgcaatgtgagagactgaaatgaggtttaaaaagtgcacaggtctaaaaggacaatagctaagcagtaacatctaccgtacatttgttttccaatcttaagaagcactgttggaaactgtggagtagaacccttcagactagttggcatgaagttagttagcggggcagggaaaatgcttccaaggcgctttggcttcatcattgcaaaacctaagtcatacctgcatgagcaccagctagccttgacaagaggcaccactggggttttgcattggtcctcagccagaagacggtaacagctagaaacaccaagcaggatgcactttggataagtgactggctcctcagagatgcagtttctcacctgcaaagagggacaatggctccttgccccatcccagggcctacagtgtactggatttcataacatggttcagcagatgtataaacgtaggacactttattatgctttccataataagtcttaaaacctgaagggagacttgaggaatcacttccgttaaagccaagtaactctgaattatgtttgatgaattatgtttgaccttgactttttccaagtaagaatgttaattaacttcatggcaagtacgaacattttactcctattttggctttatatcttcacttcctaagactttgcctgtgacattctgaagtttctttcccctttattataagatgctcttatctttgaaactatccaaatatgaaggaaatctcctgcatggatgtagcttttgcataatccctcggccatggaccaagaagtaccatggcccactggagttcttgatatctgtagctgcagcaaagtcacaaagagtggttaggagccacagcatttaagcaggtgggccagggaccagtttgatagtgaccccagtctctgaagccggcagagggtagctgcgatatgttttgcctattagagtgatctactagacaggaattcattatggggttacatgaagtctaacttctgccagaatggctcacacgataaaccaagtcacctaagagaaagaaatagaggagtagaccatgtatgcttgttttcattcattttttcatttcacaaacatctactgaacaactcctacatgccaggccctgctcaaggtgctgggggcagacagagacccagagacacttggtctccctctgtcacaggctaggattaggggtgggggatttaccatagactgggctcattgcttagttacaggaagagcacagaggagttggatctaacccaagcttgagggttaggatattgggattttcgagctgaaaatcacccttaaggccatccagttcaagcttttcattttgcagacagggacagcaacttggctggggcctgaccaccagtggggaatcccactagccatcaggctgccctcctccctctgtgtgtgccacacacagcatggtggcagacctcagctccatgcagaccacttgagcaatacaccctgttgttataaaatggtcgttttctgagaagaaaaatgtaaactccatgtgaataaatattttgggggaatatatattcagtgggtcaaagaagctctgttttatttcttagctcttgactaattgtttcaaagaggaggtatttgttatgtcctatttagtgcaacttaccaaggaagataagtccatccaattaattggagttaatggatataaaaagcttgaatagtccaaaaatcgatcatttaacactatgctggagaggaaggggagatgtaaagacaaacatcagtgaaagcagggaagcaaaatgtgtaaaacttggacccaatttgctatcagactgacctggagtcatttacaaatgtggctctgtaagcaagttatgtaatccgttctaagcctgcttttctcatctctaaaaatgaagatatcaaaaatgtctacatcattggattgtcataaggatttgacagagtcatgcatgaaaagcacttttcatatgcctgggacctaatatccacttgaagaaatgttctgtcttattagcccgtaaccagaatttaacaagttgtgatactgttgatatgtaaatgataaaactgacactgtgcatatatttgtattaatatatgcctctcccttgtcttagaaaggacaatagaaatccatgggaaagaaaagcaaaaacaaagccaggaataaagctgatacctaccctgcaaatctgcatcctcgctaaagatcagccgcatgcttcactgaaagctttctcataaccaatgcaagggggacagtctggtcagttagacaatgttcagtgttcagacagctgacaaatatctaatgagtgcctgccacgtgccagacactattctatgtgttggcaattcagcagtgaagagaacagacatatttcttacccctacagtgattatattttagtagggagaaaaaagacaatacacatggtgaataagatgacagcaagttaagaggagatacatgcagtggagacacaaagcaagataagggaaatagagtgcagttttaaataggttggttagagtagctgtctctaattaggatggtgccaattgagtacagacttgtaagggactaagggagcaggccatgtgggtatttgggagaagggtactccagacagggagaaccaccagggcaaaggccctgaggttggagcaggtctgggtgtttagtgaataaagaggaggccagtgtgctggagcagaataactgagggggagagagcaacggaaggtgaggccagaaaagtgcagggagccccattacacaaggccttgttggggagccattggagggttttgagcaaaggaatgatgtgatgtgacttaggtgtttaaataatccctctgatgctgtattggaaatagacactaagaaagcaagtttttggaagcagggaaatcaaatgggaaagctattttaataacccaagcaagaggtgatgagaaatgattatagtgtactgaaaatgagatccattttgaagagaagggacaaaggtatttcctgattgattaggaaatacctaaggggtgtaagagaaagagagaagtcaaggatgaactcacggtttggggccttaacaactaaaggacagagcaagtggagcaggggatcagaagttcggctttggatatgtgaagctacgagacgtccaattagacagtcagacagatgagcttggagttcagcagagagatggacagtgggtagttgctcagtagggcagaccccaagtcaaagaaggaatctcaccagtctgatggtgctgtctgtcttctgtgcatggcagtggcctcactgggcttgaacttgaaattgttttccagaaacagtgctagactttgaattgctcttcacacactctttaaatcttctctcctttaatcttcctccttttatttattggcaagacctttggatagaatgagaaagatatttagcaaagcaaagctagtaaacccatgaccctggcctgattgaccccaagctcagaatttcaaaacccagttatagcccatggggttattacctggcttaccccagagggcagatatcggccacagaaacatactgtagggcttacttatgttttcttaatgtgtatgaattttacggctactgagtccattcgccaggaaagaagaaattgctttgaaaaagaaagagctggtgggcacctgccatgagccgggtagtgcaatagaaagaaagaaagagctgtctcatttccttcattgcctggtcatgttttgtagtcctttgaggcttataacaaaaaaaaagcggggagtaactcttgtagcagcagattctcttattctgatagtgcatcctcagaatatggttccatgatgaaatgcgttgtgacaggcacctctgggtcttacacaaaaaagtcataaagcatcagttaagattactcagaattccttcagttgtttccttctcttggtcttcatcactgcattctccactccattttaataactcaaccctggcctagtgaaactgttatttaaatacatatatctataacctaagaattgatgaaattccaaaactctttctcccagattttctccatcctctggtaccgtgcctttgtctgcaccctgtcacctggacttggaagttgggagcagtgatttattgctgtgtgcagctccctggcagttacccactttcttttccactcagtgcagggttcttcaaagctgcaatttactgagtccattttaggtagagctaagtgctgataataaatagtttagtgatctgaaagcctgaaatgagaccctaagagacctgtacagggaaggctttacaaatgtcccaaactattattaggactgaatttccatattatgctttatagatgttcagttggaacagtatcaaatgagagaatgtttgagggcacttaagcctcaaaaaatgtattaatggagtactagaataccctgttagatggccttatccttttatgtaacttttttcttttttctcatgagtaaatcaaagcagtttgcacaaggaaaacctgagtctgtgcccatattccacacgtaacctccacgagttgtttccccttctgtaagatgggaatgatgggaatgatgacattaatactttccccaaaagctgttattttcaggaaggaaggaaggaaggttaaatgagctaaaattgcatattgcactacctggctcatagcaggtgcccaacaagcatgagtacctttctcacctcagaatggagcactgtgtgagaacaggttgcctgcagttcagtgtcaaggcaagtccagagttaaggtggaagctgatgaatgtgtgagccttgactacagggtaatatgggcctatggactgtttggcttgaggaaaggagagaatgtcaccaaagcaaattcagttgtgccttacattcctgctcagtgcttaataaagacttgtattctgtctcatttgggagtcacagcaggaaagattcttattcccattttatagatgaagaaactgagacttagatgagttacaggaaatgctagtcgtgagcagagcctagactgaaactctagtcttctgacttgtagatctatgttctaaccagtacttcttacactgctatgaggaatgggctctgggtctccctgtccagcttcaactagaatagttttggctttactagactcaaatgctagggcactacataaaatttcctatgataaaaatttctgctctaaaaaaaaaaatttgaaaaccatttcactctatcatgatatctttgcagcataatggatctcaaactaaattatattgcattagcctgagacaagatacaaataatctttcatttttcccatcattatctcagtctctgtgggctagaatctgggacagtgttgttgtccccatttgtgaatgatggaattggaagcaaaagtggtcctgtggtttgctcactacacagtgtttgctgtggaatagtaatcgtgtggttgcctaatatgcctgtttaatcagatcacaaacacagtcccagagtttagctggtacaggggaaaaaagttgaccaaggattgattgtcttagcagtgctgaatggatttttgcataactttgtatccgtggctttgtaaaataaaagaagaaaattttcaggacactttgctctggaaaaacatcactgaagtagctggttcttttgtggaattctgtaaatgtcacagaatctattgtggtgttgtacttatgcccctggccactgactcttaataaacacttctctaaagcaccaagttggaggtattagatgctcatgaaaagatgcacttgttctcccctgcccgtatgcccatgatgcccaccaagccacactctgtttctcaaggcatgctgtggaatatgtgtttttcctctaacagggaactaaaggagaagattcagccagaaatcttagagctgatcaaacagcaacgcctgaaccgccttgtggaagggacctgctttaggaaactcaatgcccggcggaggcaaggtattgtttctggggacactccaaacttggatagggtaaacagtggcccgctccctggagaatcacaagggcatggtgttggtttacgggtaggccatgcagcattgtactcaggacaggaatagcagtccaggtcgtttctggttcccatgcacacccagagagaatcaaagtccacaattaccagaagagccacagaaatgaagagccattctttgctatttagtgccacaaaaactgctagtggtggtgtcaacaatagctgacacgtatatgagcctaccatgtgccaggtgcttctgaaactctagtcttctgacttccggatctatgttctggccaatacctgttacaatgcattactttataaagcattttatcctcaccataaccctaagaagtaactactaggattgtgcccagtgtacagattaggaaatagaggcactaaagggctaagaaactggcccaaagtcacagaagagcaaggattcaaactccacagctccaggacccttccttttaatgactccccttgctgtaggagagctggcactcactgtttggtttgatcttggagcttccagcatggatggcccttattgtcaaatctcccacactgcttctcttctaggacagagttattttatatgtggatataagtaacagtgaactaagatagggtagcatcacttacataatttctcaaggcagatttctgaattgtctctataaattctaacctcaaaatgtcaaattcaaatggatgtcaaaagagtagacccaacaggtgggaaacatgtctagctgtttctttcctggacaagtaaagcacccttgactgttttcttgctctcttgacatgctgctgattgcacagctagagtcttcataccacactctcctagaagcaaacagccagagcataaaactgaaaagtaagatttgggaagaggcaaagagattgaagaagaggcaggagcaagcacaggcattagcagctatactaagaacaccagttatggcccaggagaaactttggcagatattttgaaacctgctggatgccctgctaagccacagagctcacccactaatgacaaaaatcattttgtgtttgtcagctgaactcatcccccggccatttactgtaactgtcctgtgctgcatattcagtaaattggaagtatttctcatgtcaccattaaacatcacattgaggaacttccaaaggcagaacttcctggaggaatgaaaatgcagtttcttcacagagaatgagaagctcttagagtgaatttcaagctgagcctcaggagaggacaatgggcagagtaataagggctgagttacagagaaagcctcctattagtgagaccagtggaagagggaactcctccctcccattcagccactgaagaatgagttcatgccctcctctcatcgcgttccttgcatcgggcatcatgtcagagtaaatggtgttccaagaagaccacagggctcagtggcaaggacatagccctggaaccaggcaatgtgggtgcgatcttgcctctacacctgtccagctgtgtgaccttgggcaatttccccatccgaaatggggatagcaatgcctgtctcccaaggctatcatgaggaagagaggtgattatgaatgtagcaacaagaaacagcaaaacaagggagctactgctgttctttaagattgtgtaggaaaaaagcagtgagccagagtgagtggacttggtgccaggcttctcagttctttaaataaccacctaggtgtctttaggaaggacacatgacctctcaaggccccaagttctcatctgtaaagtgggaggacaggattaggggatccaggagctcatttagtcagagagtcggttgtatgccctgatgtctttattgcctttggaaaaatcaatgtttgggatatattgcccccataaagatgatttataagatttttacttacttgacattgggcaaagggcacagaagttttggggatgggaaatggcaaatagacacccattgcctccgctgctgcccagctagagtccctcacaacctagctcctagcaccaatttaaccttctagtctactgcgtcatgagacttccctgactaggttgaagtgggtaggttgtatcagaataatcctgtttctagatgtattaactacagggtttgttgttgttgttgttgttgttgttgttgttgttgttgtttaaaaaatgttagtcccgtatctataaatttttccaattttctaaaaatgaactacccctgaacaaaaaaatattagcatctagattataaatttatgagttgagctccctagggagcatgaccatctgtgtttaatacaaaatcatccttccgagtgcagaaaggaaggctttttggtatttggtaaatggatttgaaatctggtgactggctctgtgcttaaaaatagggattcaaagcagactgtgctgaaattggtttcctatcaccccatcaaaacattccatttagatttacacagattaataagaacatgacatttttaatcccttcgagaaagacgcacttctacatgagatctcagactgggatggacaaccgcctgcctggtgccaccacaggttaaagagcagacactcccagtgcaggagccagcaccatactccctctaaacttgtctgacaatgagtaggacacagatgagtgaatttcagtagttaactttataagggaaaatatgaaagaacttacagctccacagaactggaaagtgaaggaacaaatagagagtgctcgactgtgccacgtttggctagcaggtccccgagttgatacttgctgatccttctgcctgtctcatgtgcagctctgctactggaatagtcacatgcagacatttacagatctgggtttctgggaattctaaccacattaggactgggaggtaatatatctcaaaagacacaataagctgggttgaagtccctgttcctactcactagctgggtagcctcgggcaatctgctcaatgtctttgtgctcctctttcttcgtctttcaaatggggataatgttagttcctctatcaaatagccataaggggtaagtaaaattatacatctatagcactttgatgcttggcagattatcaaacattcattaatgatgtttgctattaattttagctcgtagcgcctcagaatatagattttttttttttttttgagacagtctcgctctgtcacccaggctggagtgcaatggcatgatctcggctcagtgcaacctctgcctcctgggttcaagcagttctcctgcgtcagcctccactgggattacaggcacccgccaccatgcccgggtaatttttttgtatttttagcagagatgggatttcaccatgttggccaggctggtctcgaactcctgacctcagatgatccacttgccttgcctcccaaagtgctgggattacaggcgtgagccactgcacttggccagaatgtatatttctaagcacaggaggtggagtagcatgggagcccacacacctgcatcactccactctctccccaagcttatacatgttgaccacgaagtataagctctggtcgcagaatccttggcatggaaattgcctggcttctgtgttccctggactcctgcaggagagatttcagatgaaaccccagaagatgtctgtgttagggacactgtattagtccattctcgcattactataaagaaatgcctaagactgactaatttataaagaaaagaggtttaattggttcacggttctgtaggctgtacaggaagcatcacagcttctgcttctggggaggccacaggaaactcccaatcatgatccaatcatggtagaaggtggggcagggtcagcgaggagcttcacatggccacagcaggaggaaaagagggaggaggaggtgccacacacttaaacaaccagatctcaagaggactttatcactatacagtaccaaggggaggatggcgctaaaacattcatgagcattccacccccatgatccagtcacctcccaccaggacccacctccaacactggggactacaattccacatgagatttggtgaggacacagatcgaaatgataccagccactatttgcttcatgagaatctgtaggctcaagaactgccccctacttctcttgtattttagagatgaaggtctttcagaatcacttgcattgaatggccttggtaagagtccagggctaacattggaaatcatttcaagaagtgataacatgaaacctcctgcagaggacagtgtctgtttcattgaccagcattccctaagtgctgacatgacaggcttatgttggaactcaatgttgggcaaaatgcgtacctaccactcctgccaacaaggctggtatatcttacgttgctctggaggccccctcagaagacctagagccaagtggtgcgttcaggcatggtaaccatattgccctgttgtggggagcaggtcattcctttctccatccctggttgaaattttattttaatattttgttacaaaaaggcaggtataaataaatacatattttcaaattatgaaaagccagttcattttcatgaaaaaaaggcacttcccaataggtcagaataatacataatcattgtttccaaaagatggagggacagtagtgtggacgagagggactgccattgactagaagagcaggaaactacaaatatgttctgagaaccaattctggaagatgtaggatccatactttatgtgtgttttactcatataattatgaccattgtacatatgaagaacagggatttctgaagtttttacaattaggccaaggccccgcagctaataagcatcagggccaggtgtgtcatccagctatgtgtgacttcaaggcacctgttagaccaaatcatcttggaaagtacctagggactccggtgtcatttgctctgagcagctgtgtccagggaggcagaattcagaatcaaaacacaaatctgtccttttaaagaaagctcagtgaagtgaggaagatttgatgcccttcgtctctgtatcaatagttgtttcccttttttgtaccaacaaaaaaatcttagatctcatcacctgaaagatgacatttccctttaaacacattgctgggtccctcttgttttgtgacttggaaagtttggaccttaggcagaaagccgaccttgttctgaacacacagaagacttggcacattttaggttatccttgggaaaattcagaatcctaatggaagtgttctaaagacatcttttagaaaaacctgttctcctccctaatacaggactcttagggcccccggggtcagcccccagctgctgacagcgggctctgcactcaaaacaaagatgtgtcctgattccatggcagtctcggggtttggttcttgctgtgccctgtgtctcactgaactggctggcatttcacacctaccagtggttgccattgttcagcttgctgggctctcctggagacccagggaccagccccaagcttgtcttgggcctggatgattgaagacagacggtgggctacactgtctgatagaactacctacggctgtttaagttatttaaaatgaaagaaaatttataatttgttttcttagtattggataaaacagatacagagaatttccatcattgtaggaagttctgtaggagggcactgcaaaaattacagttgacagtggttattagctccataacaatctatgtgacattgggaatagctttaatcagcccttcttaccaggcttgtgaactctgaaagcagctcttccctcttatccttcacacacgcacacgcacgcaagaaaaagattgaaacacgaaattctccctgtattttgttttgggtttggagatgaagcctggctattaacgtactctcattagtaattgactggaagacctccacattaactattgttttctccaaaatgctagtaaacaatctttgataatgttctcactgcttcctgctaattgcttttagtgacgcaattcactctttcatcgcccagagggataaaggaacaagtaacatcatgctggggtttgaaaggaaaatacacatttgtcttgccgtaaaagaaactgcaaatcaagctgctgctggtggctgacactgaaactgtctcacccaacatgtcgacgcactgtgctgatgctatccttgtagtggctctcccttcaagacagaaatacacaacgtctaagccttccaaagctaaggactccagttttactgtgaggaagatactggctgagtagcctcccatttgattatgagtcaagacaagtttctcagcgttttcagcccctttttccaatattttgccatccatccaagacttcctaattgatgaggagtggaacacatcacttatatctgtgatgtaccaatctttttgctttttatcgttttagtagtagacagaagaagagaaacttgtataggataagagaattagccagaggtaggaggaaaaccaaggcaagatggtgtcatacaagtcaagggaatttcagctttggaaaggaggaaaatctgtccgctgcagaccctttgggttttctttaaacaaacatcaactccaactttgcaaggaagatggctgttttgcctcttgaaactctgacagatagccactgttctctgatcattactgtatgtaagaatatgttgcacaagagatttctgcattcctatttttctccatagtattgccagagttgctgatttgtcccagttcctacttcccagacctgggaaacaacatctttctcttagctgccttgaagaactgagggagctccttttccttgaactccttggccttgtctttcatgtctaccttccgttctaatgatgtttcgctacacatagtagagtgctgtgtgcattgtagacagccactcagcaaatattcattggataaacaaatttatcctgaaagtagagcagcaaaattttcgaagtcttacaaatcaatatatcttacacatgaatattaagttgtgcaatttactctacaataatatgtgtttgtattatactgtgcaccagttaaatttcttaattccctcaaaatcaattgagtgtcattgatcttgtttgattgtgacacattggcttggcttcaagtcccactgctgacccctagagtttacttaccccagcttgagaagcaagggattcctataaagcacaggccaagacctaactcacaataagcccagcatgtccaagtaccacttctcactgtcttccttcccagcctctatcaccctttagtcgctcacacagccaaacgtatcacctagatgcagcaaggaaaggaaaactttatagcagatttctccagttggctttctggtcatcacagccacgtagggcaggggaaagtatccgtggggagaggcagcccccacaggcccccaagagcactgttgatgttcagaaagccattgcctcctgctctggaattcacagttcctattgtaagttacaagtcaaatccccaaggttgctctcctcatgaaaaacccataagtacacatttgcctaatttaaatgtctgtgaattactcagagaataactgttttctccctttgaaatgctctcccagaaaaatgacccatgtttggtatatacatagcataattttgaaatttagcaatttcaaatattttcctagctgttaaatgacccttttcccactcaattttttccactagagttcagattcctttaaatctatggattgccgtactctgactatgcttcagaattctcaaactctatttaaagatgaggaagataagaatcacagagacactctccttttgtggatcaaatttgggcattttctttgttcattgtgtggcttttacttccattcttaaaacttctatttctattaaaagaatcataattaaaccatgggtttgcagtgacagcaattttagagagaaaaccacttttcttaaaatataatgaagagctttttagttagagtggcttgaaaacaaattatatttcaggtgcaataatgaggtaacttggccaaggcctcaaagggtaccaaccgcacagtggtgcaaaggggcttgtaggtgactgacacctcatgccttaggcattttgatcaggtcgctttgggtcttcatttatcagcttagccaacgccaactgtgcaacttttatgtgtcagacactgtgccaagagattgggatgttgcaattatgaagacagtgactgtcatcggagagactgtgactcttccacactgtcagggctggagtcctcttctcctatcaatattaattgttcacaatacaccctcaagggcaagttacttacctagggtctgtagcagataatgggaaatactaaggtgttaacattaggctccaatattgccagtccaagccaaactggtggtgcaaagaagactgtagaacatctcagaggatggggagaggcccttcggctgcagggataaagagggcttcctggaggagacagctgcacaagcattgctgtcacagttcaagtccctaacctataaaaagtgctctttgcctctttcttcctgcctcatagacttactcaaaatttcttctcacttttgagagactgaggcagtaaagttgaggaagttgtttataaggatgaccctaatctcctggtcatacctatccagagaagtaaattctgggaattggagaggagaatgattgtgcatgtccccattctttggctaaatccgtgaattatttagatgatttcctcatgaatcccacccaccatgtgtattaccagtgtcctaacaattcgttcatgattaatgtgcgtgtggtagcctagggtaggggtttgttgtatcagctaaaatctggccttggacacaactgtctcaacagtctgaaattctcagagaggaaagtggaagcagaaacattctgagaaatctgtttttttttctatatctccctccctcttttgtcagtaaatgaataaggagcagttcccatggtggttatcattagtgataacataacctctggaagccaccacctcataaaatctattgctattgagcttgaagagttcaatgactttactaatggttaccaaatgtataccaagcaggacaggtgataactaaatattaaagtcaaaagggaatttattgcccagggccctagaattcattcttcctcaagacttaaaatcaaatgaactgcttgtttcctccaggcaagagtattaagaaataaccaggctagtattttgataaaccacaatcacttaccttgtaaacttgtgttttttctctcagacaagttttggtattgtcggctttcgccaaatcacaaagtcctgcattacggagacttagaagagagtcctcagggagaagtgccccacgattccttgcaggacaaacgtaagtagctctccttggcagaggcctgagtggtggtcggttggttgtttcctagtcacaatatatcacgcaacagaactatcagcctaagtaagccctttgaacacatctcatctagttgtaagtcgtcgcctgagccatctcatcaagtacaagacctggatggacttggggtttggaactgaataggggagaatgtaaaatggatgcaaaggtatcttaattgaaagacgtaaactgggggttcaaatgtccactttttacattatttatccaggtgctgtgtcaaggagcaaaaacaatacaaacctgattctgtcagctgtctttttctgaaaacccaaaataatttcttattttcgtaacttatatgcctgacccctacaacatttattccttacaatttagtgtatcccatagttatgacacagagttaatggcagagccaaatatagctagtttacctcaaagacactttgaaaatgatgatccgttacctctactgtttgctaaatatttctcttgtatattttttggctttttctatatgttgtctgttttaacatacatgcttttgaagagacagtaatgtgcaggattcttttagccccacagggaaccaggtgccaggttgacagtgttaacaatacaaattaaacaagtattatagaaacactgaaatacacaagggtgataaattaatttggaggagaaatgagataaaatgaacgtagcctcagaggatatcccaagtagaaaaatccgagagggagaaaacattcagagcacttttaaataacctttaaaagtcaccttgaccttgcagtgttcagataagcgtgtcccagacagtgtccttacccagagtctcacaccttctgtcctgttaccctggggcccatggaagtcaaatctggattaccttcctcacagctcacggccattgaaggtgaaaataacccatgagtgggaaatttcctgacacattcagactctgcgctgacatctcaggcagatagcctagaacattcactcttcctccagcttaaaaatgggacagtctggtctttgtgatgtcacttagttcagaaaacgatcttgttttctttcataggaaaactttcttcccagcccacattattggctccctaagtcaggggttatagaaagaaatctgaaatccactgctgcagagagcctgggacattgtctatgcctccctgctttggggcaggagttaggggtgtcctgggcctctacctgtaaatgaggatcctcctttcacagttccagccttccccaccccaccttggccaagctagaccagcggttctctaaacgtggtccctggaacatcagcagcagtatcacctaggaacttcttagcaatgcacattctcagaccccattcccagccctgctaaatcagaaactcagtgggtggggaccagccatctctgttttaacagatgttcccgccagttctgacatgcacaagtttcagaactgtgattccccaaatgtggctttcactaataattttaaaaaaacaaaaagtttaagtaaattaatagcatgttgctaacttttaacttgggccaaaaaaaaaaaaggatattaaaaaataaaatctaaagtttaatatcacaaccctttcataaaagaaaggaccctcgattacaagaaaaaaaaaagtaagaaggacctaatcttagataaaagacagtcccttctgctaaactaaattagccctctgaaaaactcacaccagcattctcgtttttctgcatttgctattaactggtgaaaagctcactggtgtaaactcccttgtgaactaggaactgaccagagcccagcgatgtggaatcactgctctgcagtggttaaacagaaagagttgaggttattgttggttgaagcaaatagcagctccctaggaggtcccccacagccccattcttaacctgtcacaaggggaaaagtggtcaggacagaacaaacacagcttgactccccatatggtccagtgaatctgctctcccactaacaggacatagtgtttagccccatgtttatagggatgtaatcacttctcaacccaaagataggcacttgaccgacaggtttgccaggtgttagcacagcacccccatgctaattggccagctacctaggatattggcagccacagcaacaaagccttgtgtaggggcagttcctggtcttgcccacaagctaatgccccccagctctgctaagaccctcacccccaagactccagggtgaaaataactaacctggaactagaggtgctgatgccagggagagccagcttgccagggtgagtgcaggagagcaaggccagagctgcaaatctccacacagcttttcgcagtggccactgagcaaggctggttcttgaagggattgtgacagcccctcctgaccatgcctccaaaactcttagcaactgctttcctctgaaatgaagttccaaagagctgctccaaaaacagtatatccattgcaagatgaactaacaatgcatacttgtgtggatctatttatctgcacaagtatttatccacaccttgtgggagagtgtgtgtgtgagagagagagaaagagagtgtgtgtgtactagtaagactgtatccttctgcacatatgtgctagagaaatgggtatactcatgtaatgaattgaaatgaagcaatactgtgcctgagacaaaaaaaaagcccggcctaataagctgaagtttcttgctgcaggcctgccaccttggtttgcatttaattccaattctgcattctgcctggagcaaaatagccaccttttggaactcttaaaagtcagaaacctcattccactggaaaaatgagacgtgcttttaattaatgttcagtgtcattgctcttgccacataacattgccctctcttgagaccaaggcagagagtgtcttgtgccccttgagttaatccgtgctgaatactgagctattgataaatcaaatagtataatggagttttcttaatacagatagtgcacatgaggattgagggtgcctccttggctgtcttctccaaagctttaggaaatctttctttttgtattccttttctttgtcaggaaatttggcctttgaaaatcgacatcttcttacatcccccctctccccatatccctcccaagctgacttacaggttgtcatagcccccaataaacataggaccccactgctttccagccatgccctgggttcctcactgcctccctttgaaagaatctaggccagcattcctcactcccacatcagagggggcagggaggaaagttctggctcaccctgcccatgtggagatgaagcctgctccagtggatgcgaagagcggcgacacagggaggcactgtgggcaatttgggtcaccaaagcacagcgaataattcaggtctctccatctacagaattaactctgattattgataatgggaataattgcaaatggcatttattgagtgcttactatatgctaggccctgtgctaagggctttacataaattattctcaacaacctaaagaggtagataatattgtccttattttacagaaaggaaactgagatacagaaagattaagtaacttattcaaagtcataagattagtaaatagtagagaaagatctgaatgtaactgtctaactccatggcctagattttcacccactactgtgtactgcctagattaaaagccaacaatgatctcagctccagcatcaggatttaactctcagagcaaccatatgggatagataatgttagagttacaaattgcagacaaggaagttgaggctctcaaaacttaagcccaaagtagtagaggcggttggtggatgtagaattcaaaccctggcactctgattccaaaggcgcatcttttccccaccattccatgccatgtggctgatctgctaggccacagagaccaggttcttcatgcagctatcctgggatgagcctgtacctcctcatatttctgcccacaggagcttctactatggagctgtgcacacagcaagagctcaaggcttactagctacttcctttgaatggtttctgcctgaacttggatctcactgatgaaagctgaaactattttaatcatgggtggccacatttgctttttcagtagtatttttgttttaaatcacaattaaacttccttccacaggtattagcattcaaagagtttcctgaatgtccgaagtgataaccacatttggggctgtgctcagcatgatttggggggctggccccttacaaagggagaaatcatggcctagcaggggaacatgcagtggaagaagaagcactaaacccagctcttttcacctactaacctagctgtgtatcattgcataattgatttcctccctttaggatcagtcttcccatctgtaaaataggagtgttgaattaagatggtctcaacccagctcaaactgtaaaaagcattgaaagaaatgaggccatgccccagggggtaaatgtggtgggagggtgcgttcttcactggtgaccctgattctcacagatctggagcccacttctttatcttgcttccacacaaaaggcctcatcaaaatgctagcctggctttgaagtcatcaagagccccctgcagcctccttagagtgtagattctggagatatgagtctgacccctctgtttctgctcatgagaatagagaggccatcatttgagcctttctaatgcctaatcttctggtgcatctagaagacaaactatgcaaaaagcaacctttaaaagctacactgtatttttagaactttgtgttttccttttagtcataatcctatgaatgatgtagcagctggtctctaggacaagggacaatgcatataaaaaaatatatatgtacttccacaaaacctagtgaaaaagtgacgcttctccttggaagcctttctattagagattctgaagaccaccccccaggacagactatggtattactcttgtcccattccatacaatgggttttcaaagctaagggctaacttaccaattgtagcttgtggacactgtctctagttcatggaccatgctatatattataacaaaaaaactttctacaagacacttgtgactcaaactctatttgaatcttgagaacgttttttagaatgagtttgttgactatatcacattcacttcaatggtgggttttccattggaaagtcagccaacttcccagagtatccaaatgtcccttcctacggtagggattaggcagccagatcagctactgagggaaaggaggccagttcttggttatgaaaagggatttgaggagaactgaagtcagtgttcatggtcaaaggtaggttcaggaatcatagggaccacccacaggaagatgccaaccccaagggggtcaggcaaagaggcagaaaaggggtctgagatcagtcaggaggggctgtaatgctaccttgtgctgcagggataaacaaccccaaaatctccatggcttgcataacaaaaggttatttctcactcacgttatacaacatacacaggttggcaaagggctgctccatatagtcattcaggaacacagaccagtgtgcaccatgtcttccatcctctcactttctgtttatttccaaccctaggaattgccctctgactatcgtcaccttgtcctccctgagcctcctctgcccatccatccattccctgggcctctcctgtgacatctggatggaacaggtcactccttcagtttctgcagcaggggaagacagaatggagggcctccacctagaaaagaagcattttctttcacatttcattggctaaaattaatcacatgacctgactgcaaaggttgctgggaagtgtagttttctgtggccagaaggaaggagagacagctattcataactacaagtaatgtctaccagaagggtccagaatcaggttgcaagatgtggtgagatatggcaggggaacctacagagattcctggaagactcatcacaaccccactcttagggttacagagaggcctaagagtgtcaacagatatggacaaagttgttagtaattttagggtacctggaaaatgttagcatttgaggccttcttgtgtattgttttaatattctaggagtgtcaacagatatggaccaagttcttagtaattttagggtacctggaaaatgttagcttttgaggccttcctgtctattgttttagtattctaggtattctgtaattttatccttatctgtcaccttcacaacccaatttcccaatgaaaggatgtgagctttaactgtgaaatctctcatcatcttcatcattaagagagtctaaggaattgattacttggcattctcacacatcccaaattcttggtaaagccacactagccagcgtgcataccttgattcataaacccatatggggctggagggttagggattggagaggggcagatgactttgcattattttaaattaaggttccaaaccatcctattgccttctttctttcagttgatctttttgtttttaattttttattttcatttcattgtttgtagagacagggtctccctatgttgcccaggctggtttcaaaggcctggccttaagcagtcctcctgcctcagcccctcaaagtgctagaattacaggcatgagccactcactgttcccagcctctttcacctgatcttatcaaaagttttaagtgcacaaacccttccatatcttttcttatcttccgccaactccagagtaagacatgagataacatcattttgtctaactgcattatttccagaatcctgtatcagaaaggaattctccctttatttaattgagtttagttttgttgtctgtaaaacagggataataaaacctgctttatagaattaatgagatggcagagaaagagattttggagagtgagagttcagaactgtttagagttggataaattttttgagatagggctgctttctctcatccaaaaactcagaaactaaatagatgcaaatgctgtaacaagagacactgatatatgtaaagcacttggcattgctcttgtcacacaggagccctctgtaatatcagtatgagtatcactgttgttattacaatcactgttatttctactgctgcttctaatgccatgacttcaaacagtactatgatgggtgtttttttaggtctttgtttcactgaaccaaattctgcttacaagcaagctctttctctccagggatgctttttcccagaatataagatatattttagtttctaatcctgggacactacctggcttctcttcctcttttcaacactcttctttttgcagtagtttctgggaatggtaaccacagtagcggacccagtgcttagtcctgtttctttattgacatcaaagttttcacatggtgtagttacttgcattttcttttatgaattgcagtgccggtggcagatatcaaagccgtggtgacgggaaaggactgccctcatatgaaagagaaaggtgcccttaaacaaaacaaggtatgatttccaaattattgcaaatagctctatttgcccagtgcggtcggcaactgcagccagcctagccctcctttatagcagtgttcgtgtgtgtgcgtgtgttcagacacacatctcttattcagctctcctgtttcctgtcccgattccttttacgtctcttacccttattctttctctttctgaccccttttctgatgctcaccatcttttccattctctcacttcctgcctacttccaaccctaagaattgccctcactattgtcactttgtcctctcttgagcccgctctgctcatccgtccattccctgggcctctcctaacctcccccatttatgtttatttctcccttctccaacttccaccccaatatctttcattgtcttctgctgtaatcatgctcttaatatcctccccgggatctcagcgaagcctgggacaggcagagagcagctgactcaaagaatcttagaaaactttaaaggcctgatacccttcagcattgtggaaagtaggctgtgaaatatctccaactcagactaaaggagaaaattttcccagaagtgtgtattacttaagccctgcaatacctttcaccatcccctcctagtttaccaaccattccattatcattccattacagagggcacaggagggaatattatttgaaaagacagaagaatttcttttgcccgctggaagtatttgcccttggagaggccgtcagggagccagtgctttgtttatgcctcttagaatcttgtgatctataccattcatgaacaaaagtatccagattatctggagcacccagaaaatctggtaccaaaaatgtcacatagatcaataggttgcatctttatttccagtgtcagtatctaagagggacaccaaaatgatacacaatctatttaccaatcagcgttaaaataaatagtttccactgtgtaatttctattgttataagacagggaatccagttctttgcaggatggccctatctatagttaaggaaaaacaaaagtactatgaaaatactgttcaggaaggcagagggcaggggatgcagctgaagaggctgattgtaagatctttccttcttaagttctataactcacctcagctccatgggaactcctttgttgagcccatcacagcattgtcatgtaatgcatttgattggcaagcatactgatggcagggcatgcccaagaggccaggatctgtggtctatctgttacacagcaccaacgggggtttccgtttatctcttctccatgctatggggagacagagattctatagctcagcagattagagaagcatccttagctatagcagcaaatctccagttttcatggtttgcctcctgtggagcagactttcttcaacactagccgggattaccatatgctgcacatgtcaggtattctctccacaatctcggagagcacgggctctgctcagcttcagccgaggaggtccccacagttacgtaacacttggggctgagctggaaacagtgtggagaaattggcaataataggggtctgggagtctgcaacccagagaagaccaggaagggtgtacctggaaaaatagcaacctgccagaattcaagtgtgctaaataaagatagagggaattatgtaaaataggtgtggagggacttcctgtttcagccccaacatataaagagcttgagagttgtgctcccatcctcagaataaggagaagcgggcagggtgtggtggctcgcgcctgtaatcccagcactttggaaggccaaggcgggcggatcacaaggtcaggagttcgagaccagcagcctggccaacatagtgaaacctcgtctgtactaaaaatacaaaaaattagccaggcctggtggcaggcacctgtagtcccagctgcttgggaggctgaggcaggagaatcacttgaacccaggaggtggaggttgcgatgagccgagatcatgtcactgcactccagcctgagcaacaagagtgaaactctgtctcaaaaaaaaaaaaaagaagaagaagaagaagaagaagcagaacaaagcggaaatcaacaagttttcttggacctatcctagaactgaggttgcaggcaaaccatcaccgtggaatgtggaaagtcagatgtccaagaagacataataatccttaacatgtctgaacttaacatgaagatatcaaaatccatgagttatgaaactgatagaacagaaaggagaaataaacaaattcattattattaatatattggagacttcaacttcccttggtcagtaatcagtagaccaagcaggcagaagatcaagaatattgatgacctgaacagcaccataaatcagcttgatctaattgacattaatagactaatccactcagcaacggcagaatacacatccttcacaagctcaaaggaaacattcaccaagatagaccacattttggaccgtaaagcatgtcttaaaaaatttaaagaatagcagttagacaaagtatgttctcaaatcacaatggaattaaactagaaatcagcagcagaaagacagctggaaaatcccccaaatgtttggaaatttaacaacacacttgtaaataacccacagttccaggaagaattcccaagagaaattacaaaatgtttcaaactaaataaaatgaaaatccagcttaccaaaatgtgtgggatgcagtgaaggcagtgcttagagggaaatttatagcattgaatgactacattagaaaagaagaaagaacgaaaatcaataaagcttccacctcaggacactaaggaaggagagcaatttaagcttaaagcaagcagaagaaaagaaatataaaatttagagtagaaatcaatgaaactgaaatcagtagagaaaatcaacaaaaccaaaagctggtactttgaaaagatgaataaaattgataaacttctagcctggctaaccaagaaaaaaatgagagtcacccatataacagatgtggagatgatttcatttgaacatgtgaggtagtatatttggccttgtatcagactcctctctccttaaaggagactaaaaaagtaaaaccgagtaaatgatgttttgcaacctttatttttcacatattgtcatgacactcataaaacataggatggatgatgatggatagatggatgatggatggacagctggagaatgatggatggatggagtacgccactgtaaacagataagactgcaaatagaggctacttcctgggactcactggcccgtatttctagctaccctgggctcttccagtctgccatgagggataagactagcagaatttcaagcagcctggccctttaattagcatatacatggaatttacttgtcttgcaatgttactagtgttcatatataccatgtcatcaagcaaaacatcaaaaggcagaaggaaagccacgattttacctgctgaaccccccaacccacacccctttccccgtactccagaggtgccctcctgtctacctctgggacttctgggtaggaaaaggggacctgcagcctaaaaggagaattgaccagaatgtgttcataagaggtctgtcagtacacagtggatggatgacaaccaaggcaaattgctggctctttggacagtttttccagctgtggaacagcttttgacattttgtgccatgagacccatggttaacttaatcaccgagcaaggcaaactgagacattggcatctgtaaaagagatactttgttaatggcagagtgttgataactgatcatcctctcacccattcggtctctgctgatgttcccagcagggccctgagaacagaaagaagaaaattggtcctttcccttgaggtgtctattgcagaggcatttgttcatgtagtcagtcatccactcagtcagcatgggagtgcctgaaatagcacaggactaaatggggtagctggggtcctgtctttctggagcttagagtctgttatgtttaacagagttcagtgcagcaggcacatttttacggagacaagaaatggtgggttcttcacacagggatcagaaagtttctcattgagacttgaaaagaattgccatgagtagatggaaattcagttggaaggttttgatttgcaaggattaaggattctaaattcaaactctataatttataaaaataagctgatttgtggctgtgtgctttaaggtgggcattcttggtgcttgtctcactgaatttggggcttttaggtcaacagtcaacatgaaatcaccagagtgaagatccattgattcagataggagtatatttggtgtatgagaagcttccatcttcccatttgccagaattaagcatttgtttttccagtgtgatgcttaaacctgaaataggaagcatattctactgaagctgatgttctagcatcagtttgaaaaccctggtcttagccaaaaagtcctttattcacatttacttcattcatcatccattcattcattcattcagcaatgtattgagcatctcctttgtcctaggtgccaggaatccaaagataaatatgacctggcccctggccctaggtgtccagtagataacatttatatttaaatatgcaattacaattcaatatgtctatgccaaaaaaaattaaacatggagcctgggagagttgagaaaggtgatgcaggacatggcatctgatctagcttttgaaaaggaattggccaggcagagaatgaggagaagactttccaaaaggaggaaaaagtctgaaaaggcacaagggcctttgctcatgtgaaaagcatcctctaattgggaatgttgaattcagagtataggatggatggggatggggagaagaatatggattggagaactattggccggttacgctgctaagatagattggggctggagagttgtaactgcctgaagaaggtaatctctgttatgtactacatgaatgagtgttttttgccttctaaaatagaaactcaaattcttagatatctggacagcaataagctatagttctgaaatctactgctatttctgtgaccataatttaacacccacacacatgccgagttatatcctgtgtcttttatcaaaaggttttaccctcatgatgacctggatagatagagaaccaacatagttaagtgaatgctagcaaaatggccatatgtggtgagttaccgtcaaacaatgtaaggattggcagccaacactgcacactgaaaatatgttgcatacaactctactcttgttatcagtcggttcctcatttgacccatggaagatggcagtccccaaacccaggaaccattttcctgagcatctgctgacacagcgtgccttgtcttctgtcccagggccagagtgttgaatacaaaggtcaggggcctcagggcatggaaggatgttcactttcctctgcctccactctccctaggactcaggcttcctccacatgacaaggtggcaagcaggcatcagtgcagcagagaatggagagaagctgcttctagatgtaatttttcactgcactaaatccagaggaataaaagagcttcggtcatgagcaacaaagcccctgaacattcgatgtctaagtgagtgttgtggtgtgtggaggcaagtaggccctgaggggggcacagatcagtgacagtctactccaccaccacctggcgccttctccctcatggacagtgtggacaggtggcagtttctggagtattagcctgagaggtgctattgctcctggctctgcagcctccccgctccaagtgctgaagagctgaccttcaccaatgactcaacaacagcaagccagagacatcaataaaacccattacaagcgataacaccctttaacacagacatgcagctcagagaattaattcctcccaccccctcccaggcagctttggtgaaattaaagtgggaattgacattctcacgaatttcccatttcctgcctgtgtttatcaggaatctaggtcatgacagttctgatcattcatgtcgtgagtggtatatgtcatagaagggcaaagctgaaagtttgcctgctccttttccttccttctccatccccctgcagaagagaaagtatcacagcaataaccacgctgacactgtggtctcaagtgacttcagcaccctgtccggagcacatctgggctgcagtgctgttcacaccggctcttgtcagcaaggggtgatcagccacgtgatttccctgagcagtcaggcacttgtcacccagggtcagcccaaaggggcctggatgaactttaccttttcctgtttacctccaagggccccctcacgccactgtaatatcctgactggttgttcagaagcaaagctcactccctcctttttctttcttcaatctctcaagcatgagtcagagagttttcctaataaatgactctaagattagtaaagaaatcatcattttaatgaacatgccaaatctgagtacaatttgtatgaatttttgaaattatagcttagcattttgttgaaaaaaaagttgtaagaagagataatgacctatgacctatcaccttaccataattattttcatttcccatatttctttccagtctctgtccacaagtaggaattgttcataattgtgatcagtgtgtacatggtgttcatgtctcgtgcttttctccacttaactttggctccctataattatcttactgaatggccaaatacatttcccttggtggctaatttatgatttctttattacccaaaagagggagaggttagtttctcataatgttctttcagataataatatttggcttttgctttcttttgaatttttcttttgaaattatctcaggcatagcatctctggttcttgatatgtattttcatattgatttttttttaaaaagaatgatatgaatttatagtactaatagtaagtctgtgactattttaattgtaaattaaaaggcccaagagagatggttatgggaacagatgctatacttaatggcaaattgtttttgtttgtttgcttgtttcggcgcccttcctttttacattattgtctttactgggtaggcctgagtcagggcctaaagaagaatagaaaatgaggagagcatttttgcagaatagctcccattccacgactcagcattctttccttcgcttgtttctatttctgtcaaggtgaggagaccttttgagtgtgagacgctggtagatctatcctcagaacaagacctgccccctctcaatgagggacagctggaggtgaaccagacactgagaactccatgagagccagaaatagttagatgatggactgtgtcaggacagggatgcagccactttggaataattctttaatccgtctgaaattctgaaatctgtaggcactgacctcatctttttgccttttatctttctggggcatttttgctgtgagtcacaggccaaagacaaaccctctaacagatattaaggtagagaatgatgtgaagagattggctccctaagaaagaatgttttgtgggcaattactgagcagtgtggctcacagatcacaggaggggagagggatggtcatcactggtgcctaatagaagcacagagaaggaaggcacactggaacctccatgctggaacagtgtagagcgttggtttggatacacttggctcttctcttccagactaggagtcctcaggatgctgagaagagctgatgactctcatcttctgctgaccgctcagaccactagaatgatcgtcttacccagtattggtacagcatgtacagtttgagaagtgtggcttaatgtacatattagacatggcactgagtgccttggtcattggtcattcacctgcaatgaaatgaaaaatgtcacttggttcctagacttctgggcctggctcattgcgtgcactccgtaggttttcaccaatgagtaagcccgtgcttctcgattataccttgcagtctctgctgggtaagacctaagctttgtgtagcctttgctgtacagtagcttaaaggtcaaaggacagatataaagataatgggttcacctagcagcctccttaaagctggcatagcgtccacattttagggaattcatacctctgtgggcctctctgtctttcttaggatgatagaaggaagggcagtccttaatcctgttgattgggagtttactgggtttttgtttgtttgtttgtttgtttgtttttgtggcctctctggaagggagatgctgaagaaaggagaataacacagttttggtggcgggcgaggaggcaggcggtgctgtcaccttggacactcattgagcctctctaagccccacctcataaaggagatgaaaacacttgctacatgggctgcatgcgaattaaatgagatagttcacagaccgccgtgaatggagagaaggaatcatgccgtgaaccttgaagagcatggttcctccttccatcagcctcattgcagctccgcttggctagacaagctggccctatgccatggtcaatgtgcagccatttgcaactgcaaaatgaaatgtgccgattttccttaaggtgctgttttctctcatctcttgtaggaggtgcttgaactcgctttctccatcttgtatgactcaaactgccaactgaacttcatcgctcctgacaagcatgaggtaagggtctcgggggtgataatttatgagataatgttatcttttctcaagaaaaatatagaaagaaattttacttaagaaaaatagacctgcctgaaaaaatgatgaaccaaggggcatcttgctgacttggaggagaatagaaacctcttgacaaactgcccgttgcaacagattcaacttcttagtagcttgattgatagttcatggtaaagaaaaaggatgtaaaaggcctcaaatgcagcaaaggtatacttgttaatccagagaaagaagcggccctggttacagctttggttttcattgaatttttcgtttttggtctggattttcccaagataaactggtctctcttctttaaaacatctgaggaagtaggttttctaccaaatttctttaagctattttaagaggtttagggctgtctctgctgttgggattttattttcgagatgcttttattcctttctgacatcttgttatatgtataatttgtttctcttcttgtagcacgctgtcagctatatttaaaatatttagcataaatctaggaaaatgcatttgtaagataaagtagcagttatggctgatttaactttcttttataaactggaacccaacatcatgcttgaaacttttatttttagatgataccattcaaatttttgttttgcgtgtggttgcataaacagctttagaaaggaagagaacattttaatagaatctgacttttgttccccatttcccctaggacatttagctcatttagaagttattcagtatctagttttcactggtttgaagcttttgaataaaattgtatatcccaaagagagaggaaagattagacacaaatcctgcatttagaacggtgcttaaatataattctgtgtcacttgacatttagtttgctgaagggtaagactttgtcttcatctttctgaaaatagatactgtgttctactgtttctgtttttaaataaaattgtggttctacacaggccaccatattcaagatgtatagagctgtgtacaaaactacttaaaatagtagaactttggatgttatttaaatctctgcaaggctgttttccccagtgtacattaattccagatcaggataaatgctctgggactgccagatttttattcatatctgccacttcttatagatacaatgaagagaaaaatgccatatgcttgtgaacacttttaattacttcagaccactttccttctattacctcattttatttccataattattccatacaatagaaagttctattacagacattctcatttatcaaatgagcacggagagacctcccagaactgaatacctcaacaatagaaaggttaacacagttggcccttgaatagcatgggggttatgggcaccaaaccccccacacagttgaaaatctgcccataacttttgactccccaaaaacttaactgtcagtagcctactgttgaccagaaagaagccttccccatagcataagcagttgattcacacacattttgtatgttatgtggattttatactgtattcttccaataaggtaagctagggaaaagaaaatgttaagaaagtcataaggaagagaaaatatgtttactattcattaagtggaagaggatcatcataaaagtcttcatcctcattgtcttcacattgagtaggatgagggagaaggaagaggacgggttggtcttgaggtctcaggggtggcagaggctagagaggtggaagaggtggaaggggaagcaggagagacaggcacacttggtataagttttattgaagaaaaaaatccatgtataagtgacccacacagttaaaacccatgttgttcaagggtcaactgtaagtataacgaccctggcttactctctgccaggcaccattaatgctttatatgtatatttcaccccagttaaccctcatataactctaaaagaatccccatttaaaagagggaaatgaggcaagagagcttaagaaacgtgtccagggtcacacaagtagtaagaggacagagctggaatttaaacactggcagtcttgctccagaagccctacacttaacccctgcactgtggagctaggaagagaaagagcagacactgagctcgcacattcctggcaggcccatcactcagtttctacaatcaccaactcatggccaatctggttcacctgtgctcccatccactcttccaccatcacccagctgccacccctgattattttgaagcaaatctggatatcattttatgtataaatgttcctgtatgcatttcccaacaataaagactcaatttaaaaccataactgcaataccctgatcacacttaaataaattaataatgtggtatttatttattaaaccatgtgcagtcagttttcagatgtctctaattgtctcatttgtgtttttttctttcatactttgttcaagtcagaatgcaaataagatccatgcattgcagttggttgacatgtttcctaggtttctctgaatctacaggtttctctttctctctctctgtctctcacaatcatgagcatgtgccttttttccttgaaatttatttattgggaaaaacaggtcattagacctgtaatgttaatagtctagactgtgctggttataactttatgtattagcttactgttgctattgtaacaaactgccacaaacttagtgttaaagaacacaaatttattatcttcgaattctggacttcagaagtcaaatgtgagtatcctgggctaaaatcaaggtatcagcagggctgtgttcctttctggaggctctagggaagaattttcccttgtctttttcactcaagagtccacctgcactccttggcctccatccattgcaatggctggttgaaccttttcatcacctcacttcagcctcctctttcgtactcagatctccctctacctctcacttctctgactctgactctgactcttcttctgtttccttctctcacttttaaggacctttgggattacattgggcctgcctggataatccaagataatctctgttttaaggtcagcggatagcaaccttaagtcccttttccatggaacctgacatattcacaggatccagggagtaggatgtgggtgtctttggaaggcgggtattatttttcccaccgcaatctgcaatataattcatatattcatcggtcccctgtatgtcttgtgaattgtagttaaaggattaatcaaattcaggctccctttctaagcagcagcagtggtgtttgtactttcatggtgacttcttgctcccctttcttggatattagcagccaacaatgatcgttgtctggatccttggaaccattagaggttgcaaaaggttgatatcctaattttattattccttctttattaaagggatatataaagagaaactggcctcatcaactatttggttatcctaaagttatacaatttacatatggtaggcaggataaatacttgattctctttaccagttttcaaaatagtaagcatctttcaaagaagaacaatgaggcatttgggggcaggggttgagtaggaaatcatgcttttaaacagaattgtgtctcaatatgttgcagttactgtcgttattagtttctaagttatcctgtctggaacaagtaggaacaccattgggttggcatctgagtcctattgggaggaccccttacgtctttgataactttctggcattctggtatgatggagtgttccaggtttatctttatgtttcctgccttttctctgtgaagccttgattacttgtagtgggaaatgatatttagtgaccagaatctaagcatgagttgtgtttatggtcattgcacaccacgatgcagtggttcttggttggtcattattttttagccctttttggggacagagctaggtggttttcttttaagataaactaatgaattgatactgatagttccaactcaaattcagtatcagtactacagggtttttatttattggtcgatgtactttcacataaaattttctgtgcctgttgtttctaaaaagaaacgtgctgcagaagtgttcctgtgggttaaactaatctatactaggaagctagccaggcctgggaaggctgtgtgaaaagaacagtaatccccaggacttggggatttaccatgaaacagcatgaaagctggaaggggcctttgagaatgtagagttcagtggcacccgtacctgcgtgttcgttagagttttctaggaagcaaagtctcctcaccctagatctacatgatcaggatctccaaggtaggagctaggtgtctacttctgtcaaggttatttatgaagaaattgatggttagacatgttcagaatcagatcatgaggacactaattcttccggaaatcccttaacactaaattgatgtttcgatgggttaaatgctttggctgagatcacatagccaaggtagaaccaaagccctccaaatcaatgctgccctcctgaaacacagatctcataatacacccattgtgcatctcctcagcttaaaaaggaggaccgctgatgtgcatcacggaagatttccatcacatcatggtgactggagatttatatagtgcttgcagtatactttggttacttttacgttgagatctgctaccatggaatacagtccagataaccacagtgccaaagtaggttaaagagggtctggaattgccgcttgaactagtgaggcagaaaagttgggaatctggagtgcatggtagaaggaagaccacttcaacagaagaggagaacaattgctgttatagaatcctatataggactactagaaacctaaactccagtgcatgagtggagcccagcatccagaatgccaagcagctttctgagatgctggcatcaggggtgcctctttcaccaggtgtcatggttctctgtccatgtcagtacagaactccagcctctgggaggggaagctaagaagagaaaagcaggtcctcagacaaggcacagttcttccttctccctcacagagatcatagtctcctggagagacaaaaggctatgaaaggagaagaatcagactcttagttgggtactgtgaagggctttccaaaacagataatatccccaagtatgaggccccagagacctggtgaaaagaaaccttaggaactagagacaaaggctaaagaggtccccagacaggcagccaaccctcctcccattaagattgcccaataattttaaccattttggctgccagacactgggcagcataagcctatttcctagccctttagctgagaaacaccaaggtgggactgccattggccattggctccagggtgggacagggctgtcattgtgaatgctaggatcagacaggacaggccgagatgagctactagactaggagccatgactggagtcagcaaagaaacctgcttcacctgatgttgagtccagggctgttcggtagattccaccagtacctaaaagtcatagactcccacctaggtgttacattgcaagtcatggagaactccaatcctcagctgttacagagaagcattctttgcaaagaagagcacaggcactggagtcagattgcctgggttcaaatcccacccggtctacataatactgagtcacttctctgtacctcagttccttcacctataaaacagagataacagaagtatcgactttatattgagatgtcgccaaatatgaaatgacgaagtaggcagagcccttagcgcacagcctactgagggatgagtattcactgttagctatttttactattaatacttctgtaattgccaccagtaatgatcgctgttgcctcccttcctgccagtactgtatctggacggatggactgaatgcgctactcgggaaggacatgatgagcgacctgacgcggaatgacctggacaccctgctcagcatggaaatcaagctccgcctcctggacctggaaaacatccagatccctgacgcacctccgccgattcccaaggagcccagcaactatgacttcgtctatgactgtaactgaagtggccgggcccagacatgccccttccaaaactggaacacctagctaacaggagagaggaatgaaaacacacccacgccttggaaccgtcctttggtaaagggaagctgtgggtccacattcccttcagcatcacctctagccctggcaactttcagcccctagctggcatcttgctcaccgccctgattctgttcctcggctccactgcttcaggtcacttcccatggctgcagtccactggtgggacaagagcaaagcccactgccagtaagaaggccaaagggcccttccatcctagccctctgcaggcatgcccttccttcccttgggcaggaaagccagcagccccagactgcccaaaaacttgcccaccagaccaagggcagtgccccaaggcccctgtctggaggaaatggcctagctatttgatgagaagaccaaaccccacatcctcctttcccctctctctagaatcatctcgcaccaccagttacacttgaattaagatctgcgctcaaatctcctcccacctctctccctgcttttgccttgctctgttcctctttggtcccaagagcagcagccgcagcctcctcgtgatcctccctagcataaatttcccaaacagtccacaggtcccatgcccactttgcgtctgcactgtgatcgtgacaaatcttccctcctcaccagctagtctggggtttcctctccctgccccaggccagaactgccttcttcatttccacccacgctcccagcctcttagctgaaagcacaaatggtgaaatcagtagtctcgctccatctctaatagactaaacctaaatgcctctaggacggactgttgctatccaagcgtttggtgttaccttctcctgggaggtcctgctgcaactcaagttccacaggatggtcaagctgtcagacatccaagtttacatcattgtaattattactggtatttacaatttgcaagagttttgggttagtttttttttttttttttgctttgtttttgtacaaaagagtctaacattttttgccaaacagatatatatttaatgaaaagaagagatacataaatgtgtgaatttccagtttttttttaattattttaatcccaaacatcttcctgaaaataacattcccttaaacatgctgtggaataaaatggattgtgatgatttggggagctggtgttttgatttagtaacttaggttcttgctactcagtcatcagcatcacctgggagcttgttggagatgccagctcttcagctccaccctagacctgctgaattgggtgatgtttatgtacattggtttgaaaaacactgctgtgggaaaccctccaccattgctaggtcaccataggctctgagcatcagtggagaatgttacttctaagaagaccatctcgactcactgagaaaatcagacccactgtatgaaaatatctattccttttacattgctgtctcttgaccatgactttctcttttttctttcttaccatgatataatttatagaatgggtctaattaaagacatcacaactttgagggagcacatttagcaatgaaaagaatgcatacccacagacctgaaataagccagaactaaataaatctaaccgtgggttaataaattataggtcagagcccagcgaaggatgtttcttaagtcatttgcactggaggcattatcaggattgtaaactcccagcactgggagggatgtcagaagggtccaagcatgcagtattaagcgtggcacagcaccagccactctggcctcacagcacaagctgtggaagcatccaggtcatttctctttaccgtcatcaggatgtgcaattacagattgacctgggttgagatgatatggtccagagcactgcatgcattgcaggaaaaaagtcctttgcattcacaggggttccttcttcccatcagagcactcacacctgtgtcaagctgttaattccttgatcattaagcttcgatgttattaacatgtacttgctatcaggagcagttattaatctacccatcatcatgataaaacagtaagtgttaggtcaaaggcagcaaacaaagtcatattatttttttcttatgggttacaagatccaatccatgaaaaagggaactttctggaccaggatctctgaggtcctgagacactgggtttaagaaatgtatctgtcctgtgaccttggttggggagatccagcccctctctcttctggcactccagctttggtgcatttaatagaaagaaaccttttcaggactatgaaaggcagcattctccagctcctccctagaccctcctttggacctgtgagatctgaagagtatgccatctgtttccattcattttgtgaccatgtggggaaggattgttgcccatatttggccacctcaccttctctctccaggctgcccaaggctttttttcccatgcaatgagcctaccacctccaactcatctcctgttgcctgcagtttcctaagcctgggcaactcagccaaatccaaggcagaagtaaagtaggaagactgatgttgtcgtgaagtccaagttgcattctgctattcatattactcaaaataaaactgattacttaatttgaa

SEQ ID NO: 32 - DNA, 40566 bp, synthetic construct
  source 1..40566: mol_type = other DNA
gggcggaggctggaggagccgccgagcggagacccgggagcaggagctgggcctaggtctgcgccctggtgagtgaggggcgccctgggggtcggggcgcggcaggcggtggagaggggcccggcccgaaagacgcagggaagagaggccgggccgagcgttgcggctagcgtctgctccggaggctgaggggctgagagggcgggcctgggctggaccgcgccggctcgtcaggcccccgaggggtggcggccctgccggggccttaggaagggaggagagaccgggtcctggacccagaaggggcgtcgcgtggcggaagagggcgggccaggcagtcaggcacgggggctgggctgggcagcggtcggagggagaaggagggaggcgttgggtgggaagatcggggaggggcggcaaggagagggctgggaagaagccggagagcgctcggggcgggcccgcacgagttgaaagcccggggtcatgctcaacctggacccggctgcccgcgtccaccagtccgccccgtggatcctgctggctcagtagcaccccggtgcatgtactttccacctcctgcgctcacccttgagttcaggcccctctcgcttcctgcctgggcagttgcagtgtgttaactggtctgccctgcgcaggcacaggggcccttctcctgtcggccttgcaccgtgcccagagaaacctttcctttttttttgaaacctttccgagacggagtctcgctctgccgcccaggctggagtgcaatggcgcgatctcggctcacagcaacctccgcctcccaggttccagctattctcctgcctcagcctcccaagtagctgggattacgggcgcctgccaccacgcccagctaatttttgtatttttagtagagacggggtttcaccgtgttaggctggtctcgaactcctgacctcaagtgatccgcccgtctcggcctcccagagtgctgggattacaggcgtgagccaccgcgcccagccgagaaatgcagagcagatctggatgcttagggcatgaaactggcccggcgtcccacccctttgtagggtcagatccagaacctcacccaggccctggagatccggtcccgctgacctctcccaagtctgtctactcgtccgtccgcttgctcagtgctctccacacactggcctctttctgttccttctacatcccaagctcctgccttccttggggccttttatttagtattcctcctccctggtctgctcttcctcccctggcttagtcttgtaaactcttcttcatccttcagatctccgcttaagcatcacttctgcaggggaggcatccctgtccctgacttttcgaccagtaccccacgtttatcaccctgggtacttgtccttaacaacacttgcacaactgcaattttacatttatttacaaaagtattgatatttctctgtccatcccaccagattgtaaggtccacgaagaagatagtgtcggttttgcttcatgtagtatctctagcatctcacacagggccaggcaatataaatatttaccaaataaatagatgcagggtttgaatttggcaagaggaaggggatgtgaatcgtggtcactgatgtcctacctgcaggggaatgaaactgacatttggaatgctttttgtgtgccaggctctatgctagagtgatgctgctgtctaatagaaatgtaatgtgagccatagatataattttaaattttctagtagccacattaaaaaatggaacagctgaaattattttagtaatatatttaacacaatatattccaaaattatattattataacataatcaatattaaaacattattaatgggatattttacgttcttgttttttgtactaagtttttgaaacctggtttgtattttacacagagggcagcctgtgccacttttcaagtgcttagtaaccacctatggccagggattgtggtattgggctgtacagtgtcacacactttgtataccctctagagtcttttgagataactgttgttatctgcactttactgatatcgatagtgaagcttctaaaagaggttgcctgccggggataattctagagtttgtaagtggaggaggtgagattaggacctctatctgttcatcttcagtctggtctttctatatatctgatgtggactctaggaggtgcaaaggaagtttgagggtacaggaagtcaggaccaaacttctttaaaaacttcagtgtacagcatattctagcttgttctgtgctcagataatgtgtccagatgtagcagtaccacctgccaaggtggctcagcaagaagcatatttgatgcagttgaagaaaaccctgcaaggcaagtcctttgacctggtcaccatacctcggcccagcctggactaagtctggtcccaggacctggatagaaaaaaacacataccatgcagcatctcagaggtgctgagaatactaggcttgagtttatagcctggcttttctattttttttttgagatggagttttactcttgtcgcccaggctggagtgcaatggtgccatctcggctaactgcaacctccacctcccacgttcaagcgattcttgtgcctcagcctcctgagtggctgggattacaggtgcctgccaccgtgcccggctgatttttgtatttttagtagagacggggtttcaccatgttggccaggctggtattgaactcctgatctcaagtgacccgcccacctcagcctcccaaagttctgagattacaggcgtgagccacggcgcccggcctacagccccagttcagcaattgctcactgagtatctaccacgtgaccagcactgttgtaagccatttttggtgattgggcggtgtatgtcatagccttcatcttcaggatgcttcaggtatacttggaaagacaagactggatcacataaaatgactagatggtatgcaaggcatcatgaggtgtaatgaagagccagaatcagtatgggctggaggctgcaaagtggctgtcttggccaagctgcatgatgtgtttttaaaaatgttggatttaaactcctctaggcaaggtggtactttgcagtgttacagaccctacatggaggctgcttgttttatttacttacctgcttggctgcccaagacatttgaatttataaccctattaggcatgctatgctggtttcatgtgagtcactagaaaatatttgttgagcacttcttatttgccaggcattgtattagctgctgctttggaactgatcataacattttccaaagttcttccactgggaaatagtaataataatagtggaacaccaacaaatgctttgccttttgtattgactttcctcccggactgccttcacatatgctctcttattttgtcaacaatacacaacatacctgcctagcaggtagggcttactgtgttggggaaacgtggtttcagagcttttgcagtttcttcaggttcacacggttagaattctgctattatgcttagtgctttattatcccacttgatgctcacaacagctttacggggtagagttgatgctaatccccattttacaggtaagaaaatcgttagtgctaagatccaagttcaggcctttcccactccagaacacagctcctaacttgttaagctacacttcctcactagaaggccaaagttggaagaaagctcaaaaacatctagtccagcccccgatgtagatcaggacctgaggtccagaaaggcttgtgtttgtggcaaagctgtgctgcaggaggaggactaaaccagaagtgggggcctaggccttcttttgtccctaactggtggcatggccttgccagcttctctggacttcagttcccttatttatgtaatgaaagggcttggcctgattttacactgagaacaatgctgtgctgttatggtcagtattgaaggagttcacagcccgagattttagttgtaacccaggactcttcccagcacaccacactccctccctacccaagctccatctccttgtgcaatcacggttttctaaagtttaattctgaagttcatctgtattttccatctcagtttctgtttcctctcatttccaaaaactgaggtaagtggtttgtaaacactgactttttgtaaattcatctcttcagtcattgtggttagggatttggaaagttctaggcaattaataatcctcagtcagtagtgttttcactctcttctgaaggcatttaggtctggaggcaccctggagggaattttcctgtggaattctgtggacacagctatgtggcaggcagtgtgctgcaaactgggggaagagtagatgggggaatagacttaggcttcatgagtccttgccctcaggttgtcaactctcctggagctgtgggtcaaccctgagcatctgagagtttataaatgacctggggtgtgtgttgatggtgcacaaccagagttgagaaccactgtttctcggaccttatctgatctagagcctatgtcccagacttgaacatgcacttgaaccacctcaggatcttgtttgaaggcagattctgattgggtgggtctgggctcccagggatactgccgctgctggtatgcacatcacacctatcgtagccagggaagagactgcacatagagaattataaatcagtaggatcaggaaggtatgtacagaagactgggatcacagatgaggctgcaattaattttccctgaggtgagaggattaggaaagccacatagaagagtgattatcttagctgggccttgaaggttgagttgaagtttgccagctggacaaggaagaggaaataatagcacaagcaaacatacagactcagaagagcatggtttttcagggaacaggtggtctggtgagaacatggcatctgcaaaagcgaatctgaaagccagttccaccacagagccacggtggaactggagtaagttgaatgctctgctaaggagcttacttaagcactattctttaagtataggaacactacagaaggtgtctgtgcaggataagagaagacccaggccattcttacagcaggaatcaagatgaagaaacccaaatagttcccctgcccccacaccccttctcaccacacctttgcctctatgtaagtttgtggctttttaccatgtgtgaatgagtcctgtgtctaacatacttcaacaaaaaggggaaacctcagctgctgttggtatggtggtccttcccagggcttccagcagtaaacataagaaccttaatctctgccagtcaaatcctcccttttctgtacctcagagtctgatcgtcattcagtggactgaactaagggaagttgaatcacttctcagatgagaagatttcagagggggaagcctttatagagattgtgttctcgattagaaagggcgtgactccaacttgccttcttgatgaggttgcattctgttgcaggaaacataaaccaaacttacccatgcctccttcaccaaatcaaaagccaaataactgaacaaaaagtacacatccgttcttatcctgaaaggaatagggggaaggaggggagctggaaacctggcattcttcatcccaaattccttactaataggaggagatcatctttcacttcattccttaagattcggtttccaatcctgctctcagaatccagctccgtgaagcagcagtcactgcatgggtgattgataaagctccatggggcttctgtaacagtgctgattttataagcacaccttctagaagccacttagagactgctccattggagacactaatgttcctatttttctctacttttcccagctctgtgtttgaaaaactggcctttcattcttatgacttatagtaaaattgtcatcaggtcagtgtgtgcctgtctcctgttttgtagcattttgagttttccaaatcatccttatatctgtaatgcttaaagaggagtggaaggtagaagggtggggagttgtttaatccggaaggggccctctgggcctggatatggaactacagctcccttatgctggtggtttgcaattgagctacagtactgctgagtggcggagcaagaggctatttataaccctgagaattttgcaatgttactgaattcctttgacctaatttctacttcctttctagaatgaaaatgaagggagtaagcaaacacgtgctggaagggttccctataaggagatcctttatcctgggaatattatctggagaacagaattatttctagtctcctatctcctgatgtttcttttcgatagggagaaaagcagagggaggttttcctctttctttcaactagagttaggggtgctaaccctgatttttcagtaagacttattctaatgtttgatatgaaaacaacagttttttattttatttttattttttaatagagacaggatctcactttgtcacccaggctagagttcagtgacatgatcatagttcactgcagcctcgaactcctgggctcaagcaactctcctgcctcagcctcctgagtagctagggactacaggcacacgccaccatgcccagctaatttttattttttgtagagaaatgtctcgaactcctggcctgaagtgatcctcctgccttgacctcccaaagcattgggattacaggtgtgagccactgcgcccagccaaaacaaactgttaaacaatggaaatactgtgtagttagagggtattgggacgcagagggaacaccagacagcctgcacagttcatgcctgtccctgtctgtttggagccagcctggttcacaggagtggaagaaatcagagccattgggtttaagcagacacaggtgcttactgagccttcactggacaccaagtgctgtgctaggttatgagactgcagagttatacctgttctggaggaggagctagtggagatgtgtaaatatgtaactgtaatagagtatgacaaaatcgtactcattaacggaagtatgaacaggatgctgtgagaacacagaggcccctgtcctatttacttttgccagggaaagtagagaaagctaagactagtacaaggaggaggtaacatccgaactaggctctgatgcttgaataggagctcttctgacagtcagtaggaggaagagaatgtgcaaaggtacagaagaattgaaagaacatggcctgccttatagaaatagcccgtagtccaggatggctagattgtaaaggaccaaatagcacacgagggagtgtggcccacctgtagacagtggagagctgtcttctgttacaatggtgagttcttgctgtgaaggtttcttagcctcagtgtgctttggtttcagatacacaaaccagaaatctccacaaagcacctgctgcgggtcaggtgcagagccacctgctttctcatggctttccagcaacaccagacaacctggtatcaaattctggctgtgccacttgctagctatgtgacactgagccttctacttaactcctctgtgcctccattttcttatctctaaggtggggataataacataccacacagcattgctgtgtggattaaatgaattaatatatgtaaagcccttaaaatagtgccttagcattatgtaattgctagctaatgtcatcatctaaggaagtattatatagagcgatgagaactcgctttggagtcctaagacctaggcttgagacccagttctgatgtgttgggttgatttagttttatttcttttccctcccttcattttttttctttccttccttcttttaggagggaggtgtagaaagaggtacatggagaacaagtttgtcaatccgtctgaacttcagttgccttacctgtaaggtaggaatgtttttcagagttcttatgagcatcaactataataatgatatagaagtgagcaatcaactataaagaggctacctgggctgggcacagtggctcacgcctgtaatcccagcactttgagaggccgaggcagatggatcacctgaggtcaggagttcaagaccagcctggccaacatggtgaaaccccgtctctactaaaaatacaaaaattagctgggcgtggtggtgagtatctgtaattccagctactcaggaagctgaggcaggagaatcgcttgaacccaggagacagaggttgaagtgagctgaaatcatgccattgcacttcagcctaggcgacaagagcaagactccatcttttaaaaaaaatttaaaaaaataaaaataaagaggctacctgtacgttactactagatatatgattactatgaagttaccatataaccgatctgtttcaaacaaatcagacttatctagtgggtaagagcaaacccatgggttttgctctcattaattcagccattgttaattaagtgcttacccagtaccatcatcatatgctagtgatgctgctgtctgctcagacctccgttttagagttcctgcagagcttgggggcagctgtggtcttaggcgtattagttgcaatgagtagaaacatagactagcttaatttataggagttttattggcaggatacagtggactttcaggtaccccgagcataggaagtaatagccacataatctggaaagttagcaggtaatggcttttccatctctttctgatttctggcctcagttcatttagatatttatggattcctcctgcagaatcacttcctctgaaaggctcttggttttttattctccatatctttggctcgtacggatctttggcttgccatggtattcgctctgaagcttactatgatcttacttctccagggtcattatcacccagttcccttagtctgtgtcttttatttgtttgtatgtatgtatgtgtgtatttatttatgatggagtctcattccgtcgcccaggctggagcgtaatggtgcaatctgtgctcactgaaacctccgcctcctgggttcaagctgtcctccctgcctcagtctcccgagtagttgggattacaggcgcccaccatcatgcctggctactttttgtatttttactagagacggggttttgccatgttggccagggtggtctcaaactcctgacctcaggcgatccacccaccttggcctcccaaagtgctgcgattatagacatgagccaccacgcccagccagtctctgtcttttaaattcaagagaaagaactggaatagttcagctaaagttgggtattcactttagtcccatcagctatggcagggttgtggagagtgtcattcagttcagagaggctgcctgggctttgtgggaaggacagagtcactgagaatgggggcttattaatatctttcaaatagtttggtggttgcaaatctccatgctttaaaatgtatacgaatttttgaacagccgagaatcattcagggctaactttaataaagagagagtcaatctaggatatgtcatatggggtcaagagaaaataatagctataacctaatgagctttagcttaatctccaaagacggcgttcagaaaggagttaaaaatcatggggtttgtttcttagcagcaccatcgaaattaaggaagggtgtaacttcatttggtaaggactttaaaatgggcatcctcacttggattttttaaattccacttaagaatcatggacttttagacttagaaggcacctgagacatgctttagttctacactcacatctttcaatagaagaaaactgagatttggttaaagggccatgtatacattgtgaaagacctaggattgggtcctgaggcctttggttctaaatccagtcacttgtttcagcagggacaattatcccagcccagtgttctttctgttgtaccttctgtgcctgcttattttaaaaataagaagaagccaaactaaacaaatgatctaaaaagtcatatcgtatagttccatttatatgaagtacaaaaccaggcaaaactcatggatgatgataagtcagaaattcccctttaaaggactggaaggattgacgggaagaggaagtatgaagtaattttctagggtgatgaaaatgttcagtgtctcgttttgagtgctggttacagggagatgcatgtgtatatttatatgatgtatatttatatatacaaacatatgtacccttaagccctctgcattttattgtatgtaaattatatctcagtttttaaaattgacctcacaaccgtgcagtcctgtctactaattgcagcagctttgccgataaggataaggatgcatctctaagcatccagagattgatggcgccacccctagaacaagaactccctgtcttgctgtaactggagcagagcattttccccagaaattatgcagatagggccagtttcttttctgaggtttgtcgtgtgtctaggcacataaaaattacatgtgaaaaattctgccatgagctgcagaagttatggaagccttgggggccataaggccaacccacttcaatccctttaggctgcgtttaattgcagtggacagaagttgaggctggctcaaaggaaaaggggaaagcattggccgaagccagtccaagttctgtcaaccgttatgacttactagctgggtgaccttgggcacttaacaaaacactgagctttagttgtgccatcttcaaatggaggtgataatcctgttctgcctaattcgtggggctgctgggaggacacaataaaataagtgaaagcacttggaaaactagttcctttacattgtcatgttctggaaatgctggctttttatgacagtagacttctgaagcatcccattctgactaggaaatggtcatgaaagcatccctctttctgaggccgatgggcttgtgggggacaggacttttactccttttcatctaagaggtttatacttaccaggctgtgagaactgacatctgtgtttgggctgaaaaattgatagcatacatgcataatagcctcgcgacagctatgctttgtacgccaggagaggcaggtggtccccattagcgaggcatgaattgtgggtgaatggctaaacctggaggatgcagaaaggtctttttcattaagagaggggcctctcctgaacttgtaggcaaggagtgtaaatatacattgaaataatccatcagccaagtgacttcccttcgtcagaccttggagagagaatgctttagttactgcttggaataccagtaagctatcagagttgcctaggataccagtcacatgggcccatcttccagacttgctcaggatgatttattttcctttattttggagagaagtgggggagggggtcagaggtacttgcaaagccttgtccttataagaggggcccttgtgtgaggatatccttacctctctccacttgagttgtcagccgcccttgcccttggcagtagggacgaaaatagcatttcctgtcccagttatcttccccattttctgatgtcgtcccacacagaggaggctttgcattgtgtcctttgaggggaaaggggtggcatcgatgagtggggaggaagcaagagagcatgtagctgggccctgctgatgctgggatcttcctaggatgactgcagaaagaagtagcctggctcctccagctaaccactcaaccaagaaaaggctgtctattcttatctgtctcggagcatatgcttctctcctcccaaggtctcaagacaggaatttgcagtaaatacattcctctaccactgagtcttcttgactcttaaactgaagtgccacattggcatatcttgctactggctgatctatggatgatagatagtttgtcccatttcttcttgctgatttaatctcaagagacaaaatcctaagcagaagttgtggtatgatctagaaaaattcaaaccaggtagtttcatgtgttactttatgcagtgtctgtcttcaaactcttcaaaacatgtaacaagagtgaaaaatgaagaaatactctttttccacctttctgattctttctccccaggcagccgtgtctgtgtttttgtctcgcagaattagagcccattgggaacgatgccaccaccgtcagacattgtcaaagtggccattgagtggccaggtgctaacgcccagctccttgaaatcgaccaggtatgctcctgaagtgagaagcagtggttcaaggaaaggcacctggggagtgcatggcagaggacatcttgagggatggggaccaccggcatcaagagtaagaacgagcaacaggaaggctaagctttgggcctggcccaccctagggaaggtcggtcaccatggcttgggagaggcttcctcttcaacaaaagctgttaggaaagaagttcattctcatgccccagcttgaccctgcttggcaggcctcttgtcagaaccttggcatgagtaggatgttgctgctgttgaaggctttctctctctctctttcagaaacggcccctggcatccattatcaaggaagtttgtgatgggtaggttgaaatggacctcgttttcaacagtggcagctccgactgaaagagcactcctacaccttgaggggagttctgggaaggatctccagttaggcaggtcctcagcatgggggtcttgggaatcattgtcttgggaaggaagtacagttgacaaccatacccctaagacgtttatacttcttaattttttccttaaagtctagcattgccctattgaggtaggatctgagacccctcctcagttctgcacacctcctattgtggtgctcatctttacaaaaggctgaggccatgattttttcaacatgacaacctaaagctttgtttccactgtattccaaataggccacccaatcccttgagcaactcttttgaaaattacttatgagcagcttctgaacaagagagtggccaagtgggatatactgtttttctcttgcataggtggtcgttgccaaacccagagtattataccctccgttatgcagatggtcctcagctgtacatcaccgaacaggttagtacagggagaggcaaaatcaatatgggccttgcttggaattaaacgacccaaggagacggcactatttatcttcactcagcatccaggtagcttccatgtgttgggtaaagagtcactctccggacagactgggaaacaccagcccttgttcttccctagtggctagaaaaaggtggcttttacttcctgagtgcccagggtgctagaggaggatcttagaaattctttgccaaggaataagcaggagaagagggcccgactgaagatcctcagttacatctactgtaaaaaagacaaaacattattgttgattcaacttgcttgtaccactttaacattttatcttagttactttttttgtttatttttcactacccagactcgcagtgacattaagaatgggacaatcttacaactggctatctccccggtaggtattctttcttccttaggagtttattcatgtcacaaacaaatatgagcacctaccatgggccagactctgttctagaaataagtactctggagataagaaagtcagtctttttgtatcaggaaatagtacaggaaaataagtctgtcttggttctcaccacctagtggggagtaaacaaatgcaatagaaggcctgtctcaagggtcttgagagaaagttgcttagggagctgtgggaactcacaaaggggaccacctaactcagcctggagatttccagaaagtcttgccagagaaggcgtcacttagctcagatgttaaaggatgagcaagaattagctagagaaataagaaaaggaaaagtattccagtcagagaaatcagcatatgccaaggcacagaggtatgctgtgtttgggaaaagcaggagtgctgggtggctggaggcttgtagcagtcattgagaagccagatattcaaggttccttgatggcctactcgtaggtttcaactctgtccagaaggaaactggggacattgaagaattttaagcaggaagatatgttatgtttagattttaagttttagaaagatcactttagtgaccatgtggaagatgggccttaagaagaaggttggtggtagtaggaacctttgaagaggctaataaggaatgttaacagcccagtgaaggcaagtggtaatggagatgaaaggatggatatgaagagtatctaggaggtaagctttatgagtatggtgatatgctagatgtggaaggaaaggggagaatggaggatgaccctgatttgtgcaagagcagcccttaaaggtcactaaggaagcaaccagaagggtagaaagaacaccaagaaggtgaagtgactgaggagctttgggcagggagagtgtcaggactgaggagagtatggtctgcaatttttaataagcagagagatttagtaaactgagagcagaaaagctgtctaatgacttgggaggttagaggacactggtgatactcacaaaaaagttatggtggggaggccaggtggccacactgaagtggtcaagtaaaagaaaggtaaaacagtgaggactttgagtctactgctgtatcaagaagcttggttttaaaagaaaacacagagaaggtgataatgcgaaggggacgtggagtcaaaaagatgtgctttttaaaagcaggtaaagcattcatgtgtttcacaaatcaaaaattttcacagagatgtagcaaaaggtctccccgcaactcctgtccccatctgcccagttccccacctttctgacccttcgtgttggttgtttctgttgcaattttttatgtgcccttaagaatgtgttcagatggaagagaggaaggttgaaggtgcaggaaagcaggtaatcaatagaacaggaccttactggaccaggagaggaaggactcaaagcccaggtagagggaatcactttgactgctaggcccatgaagaagacagccaatatggttgcacctttggttacatttgtagaagggcagccagaaaattaagggcatgatggcacttcttttcttggtgcagagagagactggttcatctgagaggaggggaggtatgaagtgatatcagccagcgtttactgaatgcctatattttgctaaatactttgtgtaattaaatcatctaatctttacagacatcccatgagataggtactcttgatagccccattctgtaggcaaggaaactgagggttagagaggttaaattacttgccacttgtcacacagctaataaagtagccaagcccgctctcagacccaggtctgtctgactctaggcccatattcctcccatcatgttcttctgcctccccctcttctcctgaactcttctcatcttaaggacttcattcttccctcctaagctctggtaatttaatatgacagtctgggagttactcacttttatggaagtgccgacacatttcacagacctcttgcacagtgtagttgactttcccagaagcacatctctctggagcgggaggcagcagcccagaaatgctgtctcaggaggaaaattgacatttggagttggaggtttctaagtgggatgcagaccagtgctcttcagattgttctatgctatgaccttttcccgtggcgcacattttctccactgtagagatagcgagggcttctgtattgcagagagcactgtgctttgaagggccagctttgtaatagtaaaagaggagaggcaaaggggagagggccagcaggcctgactccttggcggcagcaggaattgggctccagtcacttgcttaacactgagaaaaaggaaagaagacaggtgtgtttttgttcttaagtctcttgctttctagtggagaacattaaattaacacccaaaaaacagagaatgatgaaacaataaattgtgaggcactatgtagtaatgagctcagcggaaggaaagcccagtgaatactagaggagggattttagccgcagcttgcagaaaaggaggcaggcatcctgctaggaaaagttcatgtgctaggaggaggttttgtcttcaccagccttcattttcaaaaaacaattgggaaattgtttctggctccttgatgttcttaaagtttccccagaactgtcactttgaggaacaatcatatggattctaagagaaagtttttaaaaaattgccaggcttttcacattttaggattaaaagggaccttagaggacatcagattaaattcttcacccaatgcaagaatcccttctacagcgtctttgacaggtggttgtccagattctccttgattgcttctgctgacagggagcttaatacctcaagagaaacctcttctgctgtctaacagttttataaattttattttattttattttattttttttgagatggagtctcactctgttgcccaggctggagtgcagtggcatgatcttggctcactgcagcctccacctcctgggttcaagcaattttcctgcctcagcctcctgagtagctgggattacaggcgcatgccaccatgcccagctaatttttgtgtttttagtagagacggggtttcatcatgttggtcaggttggtctcgaactcctgacctcgtgatctgcccgccttggcctcccaaagtgctgggattacaggtgtaagccactgtacctgaccaattttattttcttttttatttttgagagagagtcttgctctgttacccgggctgcagtgcagtggtgcagtcctagctcactgcaaccttgaattcctgggctcaagcagtcttcccacctcagcctcctgagtagctaggactacaggtgtgcaccaccacacctggctcattttaaaaaattttttgggagtcagggtgtcactctgttggccaggctggtgtctaactcctggcttcaagcaatcctgccttggcctttcaaagccttgggattacatgcatgagccacgcacccagcaagacagcttaaatagaaaaccttcctctattaaaccagtatctgtttctctgtgacttaccatcgttagtgggcctcccagatgcctccagtattcccttggtaggaattttttaaatccataggccaaagcggtacagaaaagatgcagataactacagattggttttggcatactaataactccctgattgattccacaaacatttatttagcaactcctaagctgtgtgaaaaaactagttctgcctcaggtttggatgtccacagaagggcctctgtgagctatccacagagtagtaacctgctccaaggagcagatggcacatatcttgtccctggcctcctagtcccgggctgcacgccagctgatggagaggacccagtcatccaacatggagacccggctggatgccatgaaggagctggccaagctctctgccgacgtgactttcgctactgagttcatcaacatggatggcatcattgtgctgacaaggctcgtggaaagtggaaccaagctcttgtcccagtgagtatgactaaggtctcgttccaaggacttcgacgatttactacatcccacagggcatcctagtctcatttcccttgagtcaaataaggagtttattgaataccacctgtgtgcagagcagtgtgccaagcactagagtccataccaagatatataattccatattgtgattctaaatcgtgtagtctatttgggctctcacaaattaaataacagtacaaaacagtactgtgccaagtgagcagtgaaaataggggctagagaagtcaggaggagagcagtcacgtcgtgacagacctgttaattgctggaaatgtttggtttgatgagggttagtgagcagatggtccagtatctcccaggtgtctgtttgtaatcatcccctgctcctccctcttcagtcacctcccagcccatacacacacacacacacacacacacacgccttcctttgtgtttaccacaggtgtcaacctacccattcaccatctccctgccacacttttgcacagggaggaggagaccagaactttgtgatacccacaagcatcttcatcataccccagagttcacatgcatgcggtgggcagctgtgccttgtgagcagcagtcagtaaacaggtgcttggagcctaacctgccaaagagggagtcagaaatcttctcagcccatagatcaactattgaaattgttagccaaatcgagtaactaatcatagatatttgttttacatattggatcttccagctgtattgaagtcctgaagccttcagctgccatcagcactgacatagttctacagtctcccaagggtacagggttagactggccttagtttcactctcttcagcctgaggataataatagctaccttgcagtattattgtgagaagtattgttaatgagaatgtgtctgaacatgctttgtaaataggaatatcatctgttaattctagagcactgtacagatgtataaaggattaaatgtataaggagaagagaaaaaagagaaaacattttaatccttattctctaccagcactagaataagagctttgcatacatcatcatcttgtcgtctccacaaccctgtgaggttaacgctgtgagactaacttgattttacagaggaagaaattgaattttgaaaagataaaatttgcttggttagtaaggtggacaggaactgaacccatctcttgcactctactgcctcttggcccaaaggttaacatggcacttacacttccttaggttctcccaacaggtgttggagtttgacaaaggtccaatgtcttctttggtcttgggaaatagataagtgattctgtgtccctgggatgaagcatatggagaaggaagatctaattacccagcaacatttttttttttttttttttttgcagcgatagatacctgggctgaatctgctctacactggctaggtgtgcacacaggcacttacagttacagttgcatcgactgatttcccatggggtgttcacattaaaattcatcttttttgtggctgccctcacacctgtgtttcccgatctgaatctttgtctattttgtgtgtgtgttgcacgtgtctcagctacagtgagatgctggcattcaccctgactgccttcctagagctcatggaccatggcattgtctcctgggacatggtttcaatcacctttattaagcaggtgaggcctccaacattctgtctttctctcctccctcagctgccagttcacaaggcttaaggggagatacaggcaatatcgccattctggtgagatcagctttatattccctggggccagatttttcatcctcaagctctagtcttctgtggcttctgaaagatttgcattttgttatattctcagggcctgcactgagatggaactggaccgtcagaactaaatatgatcaaagtagaattagattgtcagtgagactggggataaagccagccagtcaaccagtactagccctgagtcttttgaccgacttcctgagctctctcttctttttgtatatatataaaaaaaatttgcatttcatttgtaaatttgccttctatttacaaatctgcaaggtagcctgtttggattgtcagactaagttcagtgggtaggagagggtacttctggttttaccctcctttcttttacacaaaggagcagtgtcaattcagaatactgaactaaaaccaatgaataatattgtatctgctgccctagaacttcagctatcattggcttaggacattgggactccccgacactggacacaagtgaaatgaccatgtgtcaaggatattataatggggactgagaagaaggattagagtaaaaggcttcaaggtcctttctacctctcaaagtctaagtgtgtttagggggagtgtgtgtcaggggaggtacatggagataaaatgagatcccagtatcagtaaaatcctctgcttttttataccccactttctcaaactggaacccttattttgataaaaagaattaagcttttagattttgaggaaacacaattaagtggatactataatctgagattaaggtatccatgccaagggaatccctggcacattggccagggtagccgtaaaccagataccactatccacctagcaacagctgcccaaatgtgaagcagagagagcttcaagggctagcatcagatgctaagcttctatctttcttgggccctgagcttctcaattgatgtgccatctctgggtctagattgcagggtatgtgagccagcccatggtggacgtgtcaatccttcagaggtccctggccatcctggagagcatggtcttgaacagccagagtctgtaccagaagatagccgaggaaatcaccgtgggacagctcatctcacacctccaggtgtgagtaaaaaaccctacacctccctcccttcacttgtctgtcctcttttctcctcttattttaagtcttccaatcctactctcctttgcttatattccaagctgttggttggcttcttcattcatcacctcttccacactcctgccagaatttctcccatcattcagacttgatcatgtcatgctcctgcccaaaatcctctgtaactctctctgccccttaggttaaaatgaagattttcccagtcttcccataccagggtggtaccaggcaaaattagatgctttctcacatgggcccagtagtctctgtacctatgataattatataaaatactggatttttattatctgttgcccattttgaacatagagcccccttgaaacagagaccaatcattgttgtatcccctgttttgatttaagtagaggctcaattagtgcttgttgaatgaatgctcactgaaccgacgatgcactgtgggtgatttgtaagaaatatcacacaggtgtgagtttggaatatcagttcaaatccaggctcttctgcatactaggtctctgccatcagcaagtaacctagtctcttctggcctcagtttcttcatctctagaataggttaatcaccttcacctctcacactgtgaggatcaaaggagattttaaaaaggtccagcatagaggccaacctgggttaggtattcagtaaattcaggggcttttttcctttgtttgtttgttaagactcttatcacatcctaaaacattttaccagatactgagaccatatgacaaatgaacccattggagcaatgtttctcccgtctccgctgtttttacctcacttccaaccaacctacaccatgtaaggaagctggactttgcaaaacagtggtggcactcctgttgattctcttctgactgttgttcacttctgttttttagacattgtcagaatgttgccagaatcccccaccagttcgaggggaagtcatagctcccagatttgggagtttatagtggccctgtcttcactcagctatgctcccaacttgtttttccccactaatccaagtaaaaagaaagcacaattatttctttgcaactctgatttctccttgtcacttttaaggaattttcagcctcagctttctttgcttttcttttttgagacagggtctcactctgccgtccaagctggagcgcagtggcatgatcataactcactgcaggctcaagcgatcctccccatctcagcctcccgagtagctggaatcacaggcacactccacaacacctggctagttttttttttttttttatttttgtagagacagggtctcgctgtgttgtccaggctggtctcaaactgttgggctcaagcagtcctcccaccccagcctcctgagtagctgggactacaggtgtgagtcaccatgcctggtctagcctcagctttcatacccagcgagccaccaaggttgattaaggtgagagggacattataaactccagatagagaattctgattttcctgtaacctcacatctacttctctggtttttttttttgtctctgaattcagagtggccccagttgcctccctagggatgataggggaacatggcatttcataggagccaatactttcagcccacagctgtcaccagaacttatatgctttcctttttgggctgagggatacttagtgccctctgttagactccctgggtaccatgtgactaaccaggaagcccatcagaccctctggaaagacagccacagaatgcacccaagacatggcaggtggagatgtcaagtaccaggattgtaagattccagagaatgattgtagttattttgtttgttcataataaaataagtttatagtcaaagactttaaaaatacagaaaaacgcaaaattatttgcccattatctcacctccagacatacccactgttaaacattaaattgaatgtcccttcagtatttttatgcatatttttaacaaaatcgggatctcattatatatactatgtgtaccttgattttttttaactgaataatacaccttgaacatttctccatgtcaaagatttttctaaaagggtagttctaagtcttttttgcaacctagacacctttgaaaatctggtaacaagtatatactctcaccagtttggaaaaaataccacttagttggcaaactacatagaataatttctgtatcattcctggggttcacaaatactctaagctcatccctgaatcccaggttaagaatctttaccctaaaacatgacttttaataactacttaagattctcatatgtataaatgttggctaatgtgaccatttggattactttccattcttttttaagtagtactttaatgaaacgccttgtcagtaaatcttgcatagctctctgattactgtcttaggataaattcctattagtgaaattgctgggtcaagagcatgcccactttgaatgcttttgagactgagctccagatcattatttgcttataatctgtgagtgattgttttaaaccatttctaagcatcatcttgctgttcagtcttctaatctccctctctcttctttctccattgacacagctccaaccaggagattcagacctacgccattgcactgattaatgcactttttctgaaggctcctgaggacaaacgacaggtctgtggctgccttttcacatttttcatctgggctcttctgagataattctcaccccatgcactctttgctatgcagagagcacaaatccagcaattttcccaagagttcttcctcttagctgtctggtctggagcccaggagggtggctttgctaaggaagacccagggaagacctatgaggggaaaccagctgggtcttagatgagagcagggcccttcaaactttttcctctaaagggccagagaataaatatgtttgactttatgggccatatggtctatgtgatagctactcaaccttgccattgtagccaaaagcagcctcggccagtaggtaaatgaatgggtatggctgtcttccaataaaatcttatttacaaaaacaggcaacaggcctaatatggccatagtttgccaactcctgggttacagaatcaagaataaggaagaggagaccctgtggctaccctgagtccaaggagtccaatatgaatgggatttcacactaaatcttaggtttaaaggttctctgatggagattctaaacatcttccttcccctgttcattaactgtgacattatgcagatagctctgcctctgtgaaccttagtttcctcacctgtcacatgggagcaacaacatctgccttgtttacctcacaaggatgtctgaggaaaaacaagatccctgtttcacaaataaggaaactaagaatcagctgggtggtggaacaaacactgacctaagagccgaggggcctgggactaagtattctccctgctgctggctggacaagtgtttgtaacctctttttgggtctcagtttctctttctgtaaaatgaaagggccagtttaaatgatctctgacagcccttccaatactaacattctagatttctctgagaaaagcccaagtggtgttaaaagtaagacattttagttctctgacaatctcatgggctcagtaagatgaaattcaagtgggatcatgtatgtacccagctcttggtagattctagagggaagaccagaagcatctgtggttctgtctgtccttgtctttcttggatggcttggctctgttaatctgccttcccggtccttgtttgaatgtaagctgaaagctcattccgtctgcttctctctgtgcttttgctttctgccggcaggacaagcaccttaatcctctagacctgcctgtcactgtaagtagcactgccatgtggaaagggccccagctcttgcaggtggggaagtcaaagctaggcaagaatctcatggtctgatctagatgttcagggcatgccaagacccagggaaaggttgtgtgctgtgaatctcctttgtcaggacacttagggaagtactgcagattagagtcacagaaaggattaagggggtacctgccccagggagtgtggccccagccttcctttataacttgcctttgcatgggtctgtagttcaactagggcagaccagactcagaaacagctcgtaactttgatctagacaataccatggatgcgtcaccttcttacttgctttagtggaagagaaaaggtatccgtgccctttttggactcttactagaccgtgggaatccgaaaaggtttagacaatcgacaaaagggaatttggatgctcatttcttcattatagggagctttagagaggtcagctttgcgaggagatgaaaggggataagtgcctccccctgacaccacagagaagcttttggtctaagacctttatattctagctgcagaccactgtcaattacccaccttatgagttgtccacagcaagatttaatctcagtcgacctcctatagttaccagagaagtttctaggccactgtcctcctctgctagccagtatgtattcagagaatgcaaagtaaaatttaatgttcctggcagcattagccatttggaatatggctagaaatccagaagtgtgacagaggggcctttcagctctgagaaaaatgacacagagctcacagatactactccataggagaggtgtgacagctccctcaggcccactgatttaggattctctataaaattaaatgaaggcagcagtttagaaaatgaagtcatggtaattaacatcagtaagaagtgatggtcgacactggaaggaggagacaagaattatgaaaagctgtcagaaaaattaaaggcattgtaatctgggaccattttgtttatgggaaaatagcttcacatctcagtagctcctcagggtatcacagtgtcacaacacagaataatcactgatgttctttttgatgaagccgactccttagcagtgattaaattatcactgtagtcacttcagaaataaatgtatataatatgtctttaaaagatttgcataagaatggtcaaaataatgattctgagagaacccttaaagctttgctccctggaagattcatttatgtaggaaacttgatttcctgggtgggctaaataaataaagcataactatcaaagtctggatcaaatattataaaaaaggtgagcctgttataaaaaattacccaaaacaccagactcattgttctctaagccagttagaacggaatcctagactacttactgttgtagagcgtccagaccccagccgtctgctgtagggtgggagggggttgctggaccaaagcccttccttgtttggagtcagtgcttcactagagttccttctagccttagcagtggggtctacctggcacgatgcatgtggcttagaaaccatcacactgctctgtgtccatgtgcaatgtccttgtgacacaagcgtctcatcttcaagcagtcctcatctctctttgaagacagtggagttgattgtgccattaggaaaggaaatcctatttgaattaatttgcactcacaaaaatagggaatgttgcagagtgtaaaatacatctgatggtcagtggattttcgttcattcacccacttttcatttgggaggaaaaaaatttaagaaagcaaaaaaggcccagaattttgacatcaccttcctctcgatagtagtcacaggtgtgtgcctgccaccctgccttatatttgcttattttcctccacaggatatggcaaatgcatttgcacagaagcatctccggtctataatcctgaatgtgagttcctggaacatgctgtattttattactattaacaacaattattactgttattgttaatatattattattgaaattattaatgagtgaggaggacacacagaggaaccttatcaataggtaaatacctcttgaactgaatagctttttcccgcgatcctctgtgagcagagttgcctctaggcagccatctcaccagcaattgcagtgcgtccagggagggaccaaggccagctctactgtttgttgccctgcaactccagaatttttatccagagggaatatgttaaaataggcacaaagggggaaaataactcatccaactgacactgattaaaaatctgaattgtgtagggcactgacagaactaagtaagcaagtgtatttgctctcaaagaccttctggcctggtaggaaagactagtgatcatagtggggtgtgatctgggtttgtggtctaggaaaggatggaggaggaacagtgatttctgccttgaagaagagtgtttccggaaacttttagaggaatgtcttcaggtgacccttagaggatgagtaggcagaccgggaataacaggaatttcagtcagagggcagccagaacccagaaggagtgtgtgattaggcacagagcaaggagcaagtagatgaggaggctagagaggtagcgaggaccagatcaggaaaggttagtctcattcctaaggacagctgagggcatttaattgagcttgtgaagtaaccagatttgcattttagaaagagcacatgaaagacatgtgtttgctaaggggtacctgagggaggagagcagagcaggagctggcagggggatctggaaagaggtataaatccctgttaccacctgtggggtggagtagggctgatgttgggaggtggggccggtgggagtggaggaggagagccaaggatctgaattaaaaggaggcaactttggccggacgtggtggctcacacctgtaatcccagcattttgggaggctgaggcgggtggattgcctgaggtcaggagttcgagaccagcctgaccgacatggtgaaaccttgtctttactaaaaatacaaaaattagccgggcgtggtgataggcgcctgtaatcccagctactcaggaggctgaggcaggagaattgcttgaaacccgggaggtggaggttgcagtgagccgagaccaggccattgcgctctagcctggacaacaagagcgaaactctgtctcaaaaaaaaaggaggcaactttatcaactgtcagaaacaagggaaacctgggagaccacagtgaagggaataaaatgaaaaattagaagtcaagtttaagacttaagctaaacatggactttggagtctgccattttccaatctttgatcttgagcatttcacataacttctctggacttcagtttgctcatctggatatgaggactaagtgagctaatataatactgtgcttagcagggtgtctggcactcagtaagcactttgctcgtattggcagaacaggatgcagaggtgataggattgaagaagtaagctctgagcacttgtgaagctgagcagtcagctgctctaaaatgcagagtctgccagacttcaccttgcagaaccagcttctccctgctggctgcttccctggtcacacccagctaccagcctggcaggaggggccccaagcccacaagtgacaggagtacacaggttcccacacattcctgcctacactcctgagcagctgtcctggtcaccctcttctgcatgtgtggggatgagtgcgcccttctgaaggaaatttaattatgtttgagacttactatttaatcgggttagaagttcaactcatttctggacaaaccttgtgaacaagtaaagatttcactatagaaggcagttcagcatcaggactcaggacttaagtggcctggcaggaaatggctaatgcatggtcactgaagtccagggatttcactgagtcaagccagagaactaagaccctgagatacttgacagtcaagtgagacttcaggtaaaacctcaaactgtcactcatcagactggagctgtacttctttaagccattgatgctaggataattaattaccttcctgccctgatgtttcttaagttggagaaagagaattaaagagaatgaaaatcagaatcacattaacttccacctctattcaaagctgttttataaattagggagaagagtgaggagagaggaataggatagacgaaggtagagagagggagcagtggagaagaaaacctcagagtgaggcaaaggaagaggtgtgaaggggaaaagaagtggcgatggcagggaagagcccctggccatgagagagactggggggagtgggaaggaagggaagttatggggcagggggcacagagcagagaacaagagagtaaggctagagagatgaaagaaacagtgagactgagctaagaagagcgatctcacgcttaagagacagagggcgtgcctgtgacagggcgggagctacaggactggacatgatcaccgattcagggggagggagggatgcaggcagaggcctaactccagcatgttagcatgtgctatggaagtgctgtccacaatggtggccaccagtcatgtgtagtactttaaataagtctgttgtggctgaggacctaatttgtaattttaatttcattttaaatttaaatatccgtatgtggctcatggctgctgtattaggaagtgtagatctagagaaacagctagaaaaaggagagagcactggagtcacagtaggggaagaggtctagagcaggaccgtccagtggacatagaacccaaaccatgcacatgattttaaacattttagtagcagcatgaaaaaggaatagggacattaagttcaataatatattttattcagcccatgatatcgaaaacgttaccatttcaacaagtaataaatatgaaatattattaataagacattttacattttcttttttcctactaaggcttcaagatccggtatgcatttacactcacagcacctctcagtttggcctaacatttcatgggcctgggggctaccaaactggacctcacaggtctaaagagattgatctagagtcagagcaaactctagggagagctgatccaaagttagaaggagctttaaaaagatactgagtcagatacctctctaaagtcagagcgctctagagcattgctattcagtagaactctgttaatggaagtgttccgtatctgcattgctgtagccgctagccacggtgactactaagcacttaaaatgtggctggtgcaactaaggaaccaaattttcaacttaaatttgttttaactgatttaaatgcaaatagctgcatatggctagtggctgctatactggacagcacagccctagagacagagctactgagtagggaaattgaaggacatagtggtggtacatgtggaaaatggaggagagcctcatttgggcaagaaagaaccaagagggacaggattcataatggtgggtgagacagagggagtgacaaatacaagggagcaagaagggaagcaggatattgtgggagtgaggacaggatggtgagagacaggaatgtaatcaagggttgatcagctaggacagaccgagggagacatagcatgcaagagaaagacagagacagaacatgagacaggaccaggggacctaaagtggggtgtgggcatcagagggacaaaggaggaggtgatgaaccgacaggggaatgtgggggcacagagacagtggggagggagagtcaggagggagagggacatggtgtgggcggcacagggagcagggacagagtgataggagagaggagaggacaagtgagaggaaggaaggaaggagagggccgtgggagggagctggtaggagagtgaactgttcctcctttgtgttgctatctcagtatcattgaaagaaaatggcctttcccaaagcctctctgctgggtgaagccatccaaaacattttatttttctaagggaaaaacaactctgcctccatgcacaccatctattgttttgcatttagtaggcctgtgaaatgcctgattggaggaaggtccagcccccaatgttctgtatcatagccttgatggagtagcctcccccatttctggtgtggttgggtatagcccctgccttcactctgcttcccctgcccaggggaatgcagaggaagggatggcgcctttcaggcctgcagtgagtcatctctgcctgaaccaagcccattcatgctccatcgccttctagaatatgaagtcctcgtgtgtgggaggaaagctctgttcccttcccaacatacattccttttccttagcatggatgtggcccttcattaaaagagatcagttcagtcccctgctccctgcctgtgctttttctagcatgtgatccgagggaaccgccccatcaaaactgagatggcccatcagctatatgtccttcaagtcctaacctttaaccttctggaagaaaggatgatgaccaagatggaccccaatgaccaggtaggtgctaagtggggcagctgttttctcatggctgtggtgcagtccagccttagtctatgtgccaggcactgtgcttggtctttgtctgcagaagtagtttgcatctgccctagaaaatctagcatgatctgcaccatgagccaagcccatttctgtcctgctgtggtagaggtgatgcctcctaagggattgattggggccaaagtttggcccagaaaagcctgacccactgtttcttttccttgctcccttggttagccgattcacctgctgactgtctgtttcacctcgcaggctcaaagggacatcatatttgaactgaggaggattgcatttgacgcagagtctgatcctagcaatgcccctgggagtgggaccgaaaaacgcaaagccatgtacacaaaggactacaaaatgctgggatttaccgtaagtacctcagagcatagacggtggtaggccctctcccctgatgggaagtcaatggtcccacccagacagagctctgacaaccaaccccatggtggccctggaatagatgacagttaggaagctggtggagctttaatgcttgctttgctttgttgatggtgagtctgtgagtttatgtgcaaagtttggccctgtgaaacgaatccatctgtaggggggttgcggtcagctagagtgggtagagaggggacctgtcctcttacccaaactgctaggttctttgcaaagctagtgtgaatattttgtgatagagtagggcttgaggatggggttaactggaagaagtatttcttgcgtacctactcagtgtgcagcagcatgtgaagtaggttctgggatgcatggtgaggcagccaccgtccagcactcaagagctcacagttcagtggtggtgatgggtgtgaaaagagctaggacagaggtgggtgctgagtggtagcagcatcaagaggagaggcgagagggcatcccctcaggtccctgcatacacggagactgccgcatctcaaattgggtgtctttatttctctagaaccacatcaatccagccatggactttacccagactcctcctggaatgctggccttggacaacatgctgtacttggctaaagtccaccaggacacctacatccgggtaaaggcaggggagctggccttctcagtcctggtgccacatctcctgccttcctccttcatctccctaatcctccctttctcttcccccgacagattgtcttggagaacagtagccgggaagacaaacatgaatgcccctttggccgcagtgccattgagctcaccaaaatgctctgtgaaatcctgcaggttggggaactacgtaagtctctgcagctccctcttcttcagccattccttgtcatcaagagctcagtgagactcaaaattataaacagttacatgtcagtggggtcgggcgtggtggttcacacctgtaatctcagcactttgggagactgaggcaggaggatcacttgagcccaggagtccaaaaccagtctgggcaacatagtgagaccccatctctaaaaaaaaaaaaaaaaaaaaaaaaaaccaaaaattagccaactggtagtgcatgcctctggtcccaactactcaggaagctgaggcaggaggatcactgtgtcaggaggtcaaggctatggtgagcatagtcatgccactgcattccagcctgggcgacagagtgagactctatcttaaaaaaaaaaaaaaaaaaaagatgtcagtgggactagacaaccttaggtgggtttttaattttgttttttgttttaaatcactgcatcagctgataattccatcttatccttatttatgggaatcatggttgttgctttgtttgaactggcaatttgaatcatattccaaagctaccccatgcctgtgggtaagggctggctgagtctgtaacagggtagagggaaggcaagaaaatgcaccctggagaagaaagctaaggacgtgagaaacgcccatcccacgctccctgttaattgcgcgccttaggctgcttttgttcctcgggactttggtgcaaagtttccagacatgagctcccaggcccttgtggacagaggcttcatcttctccctgttttttcacttccacagcaaatgaaggacgcaatgactaccacccgatgttctttacccatgaccgagcctttgaagagctctttggaatctgcatccagctgttgaacaagacctggaaggagatgagggcaacagcagaggacttcaacaaggtcagtgtctccgggctgctctgaggcccacgggaggagaccatcacacgacagcctttgacagctggctggcacctggagaatccctgagctggaaaagcagcttggtctgcagaactgagtcacaagactgaggcactggggagcctcagccccatctggttgttgctccctctgtgaccttgagcttgtcttccacttggtgccgtaggccctcatttgtccattgaagttagcacctgtccctcccgtcctccagagaggtcaggaggataagcattagaagactcactgtggtttattgagtgcttactgtgcaggtactgctgtagttttgtgaactgggaaggttaggagagaagagtggactggcatgatgtgcacaccctgggtacttaatcgatagttatccctcggtgctttcagtcctcactctatgcagagcactgttgtgccaggccctcaaaagctgatcatctaggggtcgagtgttttgaagttgatcatctcatcataaaaaatttggaaagtataaagaataaaaagttacctgtatttacaccatccagtgacaaacatttttgttttcctctagtcttttttatcccctacaggtttttccttcattagcaagatcatactgcgcatgcagtgtggtatcctgttgttttctttaatagttgttttaaggggaccaatgcatttttttaaaacaccacagcgtgccagaactgcgcttgcctttctattcttttgtttgtttttttgagacagagtttcactcttgtcacccaggctggagtgcagtggcactgtctcggctcactgcaacctccacctccgaggttgaagtgatccttctacttcagcctcctgagtagctgggactacaggcgtgagccaccacacctggctaatttttgtatttttagtagagacggggtttcaccatgttggccaggctggtctcaaactcctgacctcaggtgatccgcctgcctcagcctcccaaagcatgagctactgcaaccggctggtatctcatattctttatggcaacacctatcaggagatgtgtcttcctttctctcggtttagagatgagtagatgcacacctaaggatgttaagtgacttgctgaagggacagagtcaagatgtgaacccatttctttctgactacaaaaatccatgctcatttcccccacaccattgaccaattgaaatatatgggaaataaagcatctatcagtgtcagtcatgtgacctgaataaccatctaagaaggtataccttactcacccagcagatgtctgtagtgcctgccctgctcaagaccctggggcaggaaagagccttggtgctccataataggcctgtccatttctcaagagtagtggtgtgagttggctgggttcttctcctcttaggttatgcaagtcgtccgagagcaaatcactcgagctttgccctccaaacccaactctttggatcagttcaagagcaaattgcgtagcctgagttactctgagattctacgactgcgccagtctgagaggatgagtcaggatgacttccagtccccgccaattgtgtaagttccatctcaggggaggctggcgggggaggtggctgccagctctgctttccttccagagctccactgtccccatgaccttccgctcactccagtgtgtgtccaccccagggagctgagggagaagatccagcccgagatccttgagctgatcaagcagcagcgcctgaaccggctctgtgagggcagcagcttccgaaagattgggaaccgccgaaggcaaggtgagaggagacggggcaatccttggtgccgggaagagcctgcctggatggccccttttgtgcccaggcctttcccagtactgtcgttgctcacctgtttggcttcccttgtgttccagaacggttctggtactgccggttggcactgaaccacaaggtccttcactatggtgacttggatgacaacccacaaggggaggtgacatttgaatccctgcaggagaaaagtaggttcatttctctgttgatgtgtcatggttgctggacttgtcaggagacaggagttctagtccagctgtttgtagctgatcatctgggcttgtacctgttacctctctggacctgtttccttatctgtcagcgatttcctctacctggcctactcggtggggtggtttggagaaacaatgagttcacaggtgtgaatgtattgtgtagactgtaaagggtggtacatgactaagtcgaaaggcagtagttaagaggagaagctgtgaagccagactgcccacattcaaatcctggctttgctcctaattaacttgaattctaattaattgcaagttctcccctctgccttggtttcttctcctgtaaagtgggaataatagccacactttcctcctaagaggattgcatgagtaatgtatgcaaagcacttagaagagtggttggcaggtagtcagcataactgttagcagctgccactgctgttggcgatgatggcatcatcatcgccattattgtgaaggagaggggaagggagtcaccaaggtcccgttccttggggatataaatccaagagccctgaagtgaccctcagttagctttgacacagcctcactgggctgtggtctacaggagtgaccaagacggagggaacagtacaaggccatcctccccaccaccctcactgagctcatacagcagcccttggagtttggggctgaggcttcctatgcatctgccccagtacctcccttccagcactgatgtaggcactgaccagcttgcagcatgaacttccagagactaattcccatcatttatcagttcctgttgcagacattaaggccattgtcactgggaaagattgtccccacatgaaagagaaaagtgctctgaaacagaacaaggtgagtagagaggccagtttgagtagctggcccagtgatacttggagagtgccattggtggtggttttttccaggtgcattcttggcatcttcccctctctattcctgaatgttttattaagaattttgaacatacacaaaaatagatggaacctctgtatacacatcacccagactcagcaaccatggccagttctgcccatccacttgtttctctcctttatcgctttgaagaaagtcccaagtatcacactgtttcatctgtaaatatttagtgtacatcgtatagtgtataacattgccaccagtccattagcacacataacaggaaatgaaagtagttatttcagatcaaatattccactgatggtgactttctaccaattgtcttataaatgtcataatttctctacagatatataaatgtttatatggatacacacacacacacacacacacacacacacacacacacacacacccccatacccatcttgtctaaaccagagtctaagactggtcttttaagtttcttaattcataagttcccccgcccccccatcccccaccatcttttcctttgcagtttattagctgaagaaccagattgcttgtttggtagtttcctagcatctgaattttgctgattgtttccccgtggtacagtttaacttgttcctctgtcccagatctgtacattggaagagggatctagaggtttgatccagttcaggtttaacttttttcctggccagtgtcatcagtggtattatgttctatcaagaggcacataacgtctggtggtctctccttttgtgataattagcagactgttgaagctcagtgcctcattccatcagtcaactaaggtttgcaaactcatgatattttgatgcagtcattgcttttcatttatgagctgaaccatgaaacttgcccttatctactattggtttcccagtggtacagtttatataggaaacgagaataaatgctgattcttcttttatgtacttactttcaaaataatgagttagttccttggtatcatgcaacagtgaccaattttgtgtgtgtgtgtgttttgttttgttttttaattgttaagacattcctatgccaaatacagcacgatagaagttgttagtcatcttggtaatataaaaacttttaggataacttacagtcatggatcgtgaccttccagggttctgagtgttgaaaatgacttttttccaatcttaaaaatatcacaacatctttgatgtgacttgggcagggagtgggtaagttaaggttgatttatgctgggcctcatctccagccacacttgtggccgcctaggagcattgatgacattcatctgaatcagcatgtttggtgatgatgccgagtcactaggactttggccaagatcttgatgtgcagaccccaggctgttccatcgctctaatttaaaccctttctccttcaggaggtgttggaattggccttctccatcctgtatgaccctgatgagaccttaaacttcatcgcacctaataaatatgaggtgagcagtgtggcgctgccttagacaacagagctatttctgtaactcttcagttggtggcaggaatgagcaaaacaggaaagtcccctgtggtgggtggctgcagtgtatattgaagcctaggaaggctttgagaagaaggtggcatttcaataggatgggaatgtctcaaaggaggagctgtggttgggggggcacccagatgaagcagcaggtatcattacataatgctggacctgaggttcctccaggcgcattgggtggctgccaaggatctgtcacactctggattgtttatctgtgagctgggctctccacattactcttcagcagcagccataggttgtcattacaaagataaggtcaactaggaatgagtcatttacctgggactgggaaaattctccccttttcagtttctctgtggtcagctacccaagagaacttgacagatccttcctcctaggggctcctggtcacatgttgtaatggatccagtgtggactttgaagccagatggaactggtccttctgacaagggccctgtagttccatctgcagcactggaagatactagatattaaatgagtgattgcatttgagaccctatgtgcctggtgagctctgagagccatcactgggaactagaggtgggacttctggcagaggagacacttgggcagggcctgagctgccgctagtggaatttggttgagaggaaatgaagaacaagcaagtggggaaccaggtgagcaacggtgtggaaaaaggaaaatggcagcagaggaagcaggaagagtcagggagcggtgggatcagaaggcttcctggtcaccccctcttagcatgagacccaccagttccatttctttagtatttactctttaatatgtattgactggattatttttaattttgttttcgggggggcggggcacaaaattgagatcccacagtgacttctgtttgtgtcttgcttcttttcacctaatacatatttcccttctctcgcttctgattttgggtaacttcaggtagatgatgccccagtactcagatctcattttgctgtattcgtttattgcatttttaggttctccttcatattattgtaaggagttgtaatataaaaccccttataaaaaccagatctcttgagaaagtgaaggatcacctcctaatttatctttgctatcattccaaatcagttttgcctatactgattagttccaaaaggaactgttgtgagccccatcagaaaagagaccttggcaggatctcctgctgaccaggggtcacgatgtgacattttgcaacttgctccccacagtactgcatctggattgatggcctcagtgcccttctggggaaggacatgtccagtgagctgaccaagagtgacctggacaccctgctgagcatggagatgaagctgcggctcctggacctggagaacatccagattcccgaagccccaccccccatccccaaggagcccagcagctatgactttgtctatcactatggctgagcctggagccagaaacgacggtacccaggagaagggattttgggcccaggagaaacacttacattctggtgccttgtcttttgcttgtacagaatctgtagtgattttggtggccagtaaatgccagccatttctcaaacccacctcggaccacccagagtttcctcttggtccctgtctactaagagtcatgaaggcagggtgctctgcccactccatcaccatgaagcctgggattgggccacgaggaacaaacagcagatgcccttgccttccagtccaagaaactgcttcttgaaatggatttaacaacagccactcaccttttcctcctgagcctgctctctgatcagctggatccccacgtgagcaacagctggcccaggaaaggctgcctgcagaggacaggtgtgttgggcgtgttgagagccttgaagtgactacctgtatcttagatctgagtacaagcctgaggcttttgcttttgtcttttttgatgagggctcactccagcttcatatggtgccaagacgttgctgcttctgaggttggctctaacatctctggtctttagagccaccagatctctctggcccatacagatatcagagcagacggaaatttctccctgcaagcgctcagtctcatcccagcaagtcaaagacctcctggccaagtcctgccctcttaagtctccaggaacgctgcagggaaaacccagctgaggcctgggcctagactgtggtgaggtcactagattctactgctcttcccccacattaataccttttccttcctcagagagaaatctcccctaacctgaattgcagccccctccagtttgctttcctttggccttccagaccccaggaagttggccttcccttcctagtgctatggtttctgccattggccatgatttcagggagctggctgaggccggctgaggccacacctgtgccagtggggcttccctggtgctgcagcacttgtaaaccacacacacagcctctctccctggacatacgttagcacattggcattcagtattggtggcctggcatggtaggtactacccaatgaagagtgtactatatattttcattactataggccatacttatacagacgtgtatatatatttatataagatctacctatcttaggatggaaccttggggaaaaataaaattgaggggaagtaaaaagtatgtaacacttccagttgtgagccaagattgtaaccagagagcagccaggagcttcctgtcagtaaccatgttttcaataaatactctttcatgtacaaa

SEQ ID NO: 33 - DNA, 4874 bp, synthetic construct
  source 1..4874: mol_type = other DNA
ggaactaacctcggctcccttgggaaggccgcgttgcatggccaggagcagcagtctgggccgcgagtgcgggacaccgaggtcaggtctcggaaagggaggacctcctcgtccccaggggccccaggccaggtgcacccttggccgcaggtgcacggtctccggaaagtgcaggcgcccacgtcccagctggaccatggcgcctccgcggaacgtggtgaagattgccatcaagatgcgtgacgccatcccgcagctcatccagctggaccaggtcacccggctggtcccgcctccatctgccccactgccccacctcccggtagccccctggccctcggggcagcccgccccacccctccccccaggctcctccccatccctccctgcccaggccgcgagaatgaccactccacttgcaggcgaagcccctggccgctgtgctgaaggaggtgtgcgacgcgtgagtgctgccgggccagggcctgcggagggcgggagggcaggaggggcggcgccccctgccggcctcgctgagcctcgtgcccctcaggtggagcctgacgcactctgagcgttacgccctgcagtttgcggatgggcaccggagatacatcaccgagaatgtgagtcccctctccccagccccaagctcggccttccgacccctctaacccacctggccccgataactctggctcttcatcccactaccggagcgcgatctgttattcacccccagccgccctcaccgacaccccagttgatcagtcctcggagccctccctgacctcgctgccttttctgctgtcttctccagaaccgcgcggagatcaagaatggcagcatcctgtgcctcagcacggccccagtaatgcccctcccgtcccgccttccccatccctgcccctttgctccaggtccagaggccccccgccccggaggcccccgccccagccctgccttgcgccacctagttgacgcccggggccgcacacttccaggtcccacccttaccatgcccagcctcttcacctctgctcctgctccgttcctgccaggaccttgaggctgagcagctcttgggtgggctgcagagtaacagtcctgaagggcgccgggaagccctgaggcgccttgttccgctggcctcggacatgatctttgccagggaggtcatcagccgtaatgggctccagatactaggcaccatcattgaagatggggacgagtgagcacagggatgtgtgggctgggggagatggtgggtctttctggtcctggggtggtcctgctcagccccagatgtcccccctccagcctaggagaggtgctggccctcagcctgagggccttctcagagctcatggagcacggcgtggtgtcctgggagactctgagcatcccctttgtgaggaaggtgggtgggctttcctagggcagcgggtgggggcagtggagcagtggggcagtggtagacccggtcttccatgggggtgaggtggtgacacccccgccccttacaggtggtgtgctacgtgaacatgaacctcatggatgcctccgtgcctcccctggcccttgggctgctggagagtgtgaccttgagcagcccagccctgggccagctggtcaagagcgaggtgcccctggataggctgctggtgcacctacaggtgtaagcctctggggctggggtccagatgcagggagcagggctggagcctgaatgttccactgagccctcttcttgccataggatgaaccagcagctgcaaaccaaggccatggccctgctgacagccttgctgcagggggccagccctgtggaacgcaaggtgagtgtcgatcggtggctagatgggggcagcacccggtgggcgctgccccaccctgaagcaaaatcctctaagccccccttttttttttttttgagatggagtcttgctctgtcgcccaggctggagtgcagtggtgcgatcttggctcactgcaagctctgcctcccgggttcacaccattctcctgcctcagcctcccgagtagctgggactacaggctcccgccaccacgcccagctgatttttttttttttttttttttttttaagtagagacggggtttcactgtgttagccaggttggcctccatctcctgacctcgtgatccgcccgccttggcctcccaaagtgctgggattacaggcgtgagccaccgcgcccagcctaagccccctttctttctaccccctcagcacatgcttgactatctttggcagaggaaccttcgccagttcatctataaggtaggaagtggtgggccagggggacctctctgcccctccctccccgtgagccctcgcttacaccagggactggctgtcctgcagaacatcatccacagtgcagcaccaatgggcgacgagatggctcatcacctgtacgtactgcaggctctcatgctggggctgctggagccgcgcatgcggacgcccctggacccctacagccaggtgtgtgtctttggtgaggacaaggcagggggtggcttagagcttggccttgaatctataatcttgatcccctcccccgccacccaacactgaccccaggagcagcgggagcagctgcaggtcctacgccaggctgccttcgaggtggagggggagtcctcgggtgccgggctaagtgctgaccgtcgccgttccctctgtgcccgagagttccgcaaactgggcttttctgtgagtatcacccctacccaactccccacccctgcctcagcccagggctgttgttccaggcggccgtggcccttcttgaactgcctgtgcccacttcccccagaacagcaacccagcacaggacctggagcgcgtgccccccggtctgctggccctggacaacatgttgtacttctccagaaacgcgcccagcgcgtacagccgggtcggtgacagggtagggtgggggggtggcagcatcccccaggcagggtccccatgggcttagctgtgactccttgccccattctctgcgcccccagtttgtgttggagaacagcagccgcgaggacaagcacgagtgcccctttgcccggggcagcatccagctgacggtgctgctgtgtgagctgctccgtgttggggagccctgtgagtggcctggactgggcacagcatggccaagagcaggggacggaagggcagagagggccaggggctgtatgcactttctccctgagcccctcctgcccccccactccaggctctgagacagcccaggacttctcacccatgttcttcggccaagaccagagcttccacgagctcttctgtgtgggcatccagctgttgaataagacctggaaggagatgcgggctacacaggaggacttcgacaaggtgggtggggtgggagctgggaggcctgggccagggcagggggctgatctgggtacagagcttaggccctgagctgagcttgggcggccccaggtcatgcaggtggtgcgggagcagctggcccgcactctggccctgaagcccacttccctggagctcttccgaaccaaggtgaatgcgctcacttatggggaggtgctgcggctgcggcagactgaacggctgcaccaggagggcacactggctccccctatactgtgagtctggggggatggatcctcagtcctagccctaccttccttggtgccccctgggctactccccaggtcagatgtgctcagtgacacccctctatcagggagctgcgggagaagctgaagccagagctcatgggcctgatccgccagcagcgcttgctccgcctctgtgaggggacgctcttccgcaagatcagcagccggcggcgccagggtctctgaatgggcatgggcagggggcagagggcaggcagagggcaggcagagggcggctggcttggtgtcaggacctctcagcactctggccctcttccctttctccacgcagataagctgtggttctgctgcctgtcccccaaccacaagctgctgcagtacggagacatggaggagggcgccagcccgcctaccctggagagtctgcccgagcaacgtaaggcgggcaggggcgggggccagatacctgctctccccagaccgccctgggccccggggctgccagggctgcagtgctcagcccagccttcttcctgcagtccctgtggccgacatgagggcactcctgacaggcaaggactgcccccatgtccgggagaagggctccgggaagcagaacaaggtgagtacagcgggccaggggctccttcccacccgcccccgcctaccctgtcccctgctcagtgtccccgctcccttgcttccccaggacctctatgagttggccttctcaatcagctatgaccgtggggaggaggaagcgtacctcaacttcattgccccctccaagcgggaggtgagtgtccgccaggctgaggtcggcaggtgggcaggggaggcagatgggcagaccctcacggctctgtgccacccccagttctacctgtggacagatgggctcagtgccttgctgggcagtcccatgggcagcgagcagacacggctggacctggagcagctgctgaccatggagaccaagctgcgtctgctggagctggagaacgtgcccatccccgagcggccaccccctgtgcccccaccccccaccaacttcaacttctgctatgactgcagcatcgctgaaccttgacagtgtggctggccatgggccacagctgcggccactgcagcagccatgaagggcagtgggtagaggagtgcaggcaccctgaccagcagagattgctgcagaaataaagtctgcttggctcttggga

SEQ ID NO: 34 - DNA, 158901 bp, synthetic construct
  source 1..158901: mol_type = other DNA
agacggcggtgggacggccaggccccggccccgccagtgtgtccgcccggccccgcgtcccggagcgcccgcacccggccccgccgccgcctcaggtaagcgccgctcctgccggcgccccccggcggcctggctgcctcccggccccgcccggggaacccagagcccgcgcccggcgcccgcggggagcctcggcctctgcctgcccgcgggcccctgcgctccgggcggccgcgtggtcgggcacggggggccgttgcgcaggggccgcggcccgaggggcgcggagggcgtgtggggcgaccccggtctcacgtccccgctgcctcccgccgcgcccggagcccagccagcctgtgggaggggagcgcgcggggcccgagcagggaaccccgaaaccccgtccgggcagggtcgggaaagctgggaagcggaggcaagagacacgagtcgggagacacgagccggggagcccataggtttcctctgcctttggagcgaacccagtcccttagcggggagcgggcggagtgtgagcgcgcgggtgagcccgtgccggggtgtcggcaagagaccgcccgggagcctctcgctggtccggggcttcctggggttgcggggcggcccagcgaggcttcaccctcctcgatgtctgggtcacgcttcttgcccaggtggtctctggctggcgcagatacaactgctctgtctaccatggtctctgcaagctacaggggaccttcctggcaggcagggacgcgggaaggaagcctaggaaggccggggtcagcgaggagacgctggtggagaatctgagaacccccgtggccatctcaacctaccccttcacagtatgaggccgcgaagtttttctcccacgaacacttcccctgcaacaggtagagaaacgggggcatatagctttcagcaaacctctcaccgtgtacactaatgatagagtttgccagccactcacagggtatcaaaatgcccagacattaaagggatagctagaacatgcacaattttggaaaatgttaacattaaacgccttttatgatttgattctcttcatctttgcctatgtcctgaaagagaaaataatataacaaactaacctcacacctaatttgttcctaaaggaggttttgcggtcagccaaacctttccctctcccaaaagtcgatgtctctggcagtgacctcgcagtcaactcggatcctcagataaaaaacattcagtctgttgaatctatgtctaaaatgtgtcctgatctgtcccctttttcttatgcccccaccccccaccctgccccttgtccagggtaccagcatctctttactgtaggatttcagttcccccttcctccattctctatatagcagcgtgcgtctgtgtgtgtctgtgtgtttaaatgggtaaatcagaccatatcagtcctctttatggagtccttcagtagcttctccttgcaactggcacgcaatccaggagacctccttctcctcacacccccagctgatccagcctctgctgtctcggaccaccaggccattgccccaggccacactggctgagcttgctgtccagcactggtcccctgcactgctgcctcctgactcttcacacagcctcagaaagtcttccctggtcaccctctgaaaacccacgctccctctcacatccctcactctgcagcctccctgcagtccccattctgtactccttctttatctgtttaatttctccttaattatcttgtggtctccactggagctcttggggtcagagactgatctgtcttgcttattgctgtgccctcattcccataactgtacagggagataccccgtgcatggtggtagagtgactggatggggaatggacaaccctaacttacctgtggtttcagactcatggagcatttctctcctccaccctttttgggctcatctgggattgagaacaacatatttctctggcctgcagctccaagatatttggatgcccccaaacccattaaacacattttataggcaaaagccaatgctagtaagggatgcaaatagcactcaagagatttctagaatcatgggctaaccattttgaccaggattttgtttcaaaaaggaactaggtgatatgaatgagcatgtctagcatgctttgcttgcaagggacttctaacttctaactgatatcgacagtccttcccaagcctcctaaaatatctgggcttctctgctgtcagaagctttatagcaattacttagctgtctgctcccccaccagcttcacaaactcatgaagttccctcttcatagaaagaactcaataagacatttgtagaatgaatgacaggttcttctcttttcttttctctagagtcttgctctgtcacccaggttggagtgcagtggtgcaatcttggctcactgcaacctccacctcccccagtttaagtgattctcatgcctcggcctcccaagtagctgggattacaggcgcccaccagcatgcccagctaatttttgtaattttagtagagatgggtttttaccatattggccagggtgatctcgaactcctgacctcaagtgatccactctcctcggcctcccaaagagctgggattacaagcgtgaaccaccgcacccatctattttcttttccattaaatgtttaggtttattcattaatgcaggtataaatagttggcaaaaggaaattgatgaggttttgaaaaatcatttaaaccatcattactgctgaaaacctcttgatgccctctttagggtgtataatgaagacatgtaacttgtaatcatcacttgttggcacctctctggacccaaaagaagcaggaggaagcaaagatccgtttgagggcaaagattgagcaaaatttgaattacctcatcttaaaacttctaccttagaatataagccaaaatagtaactagaattttaaaactgctccaggggcagagtcttccactggtaaagtgattttcaaaaggaaactgaaaatgaaaaggggaacaaaatgtgctgggtgagggttagcctgaaataattttaagatttttttttttttagaacttaaaaacattgtatggtaagacacttctgttttcaggaagaatgtctagcgtttggatttttgaaatgctgttggttatgtgcggtagctgttttggagaggtgtctgaaagcagatggcaactgtgcttctcagtttctggatgtgaatgtgtgatcggaacgtttattttaaaacagattctgtcttgctggctcttcctctctctgtcacaagttgattttccaaatcaggttttgctatttataaggctttcatcatcccctaaattttgcccagattgatcgtttttcctttcctccttcgacttttcaggcttcccaacttcaaacacaggtgtttcccacacgtggtttgtgtcgaccatcccttttgcctctgaaacatgtgcagcttgcacaaggctgctggagcctggcttttctagctccacctttccctgccttgacgagtccagtccacctgggccaggtgcctgagttctaggcttttaggtgagaaattcccacagccttgtcctgtaccttacttcgtgcccctactgctcacggcatcttctagaacctacccgctggtgaggctggcatctgccctccagcattgatattctgatcttattaattagcagggaagtgggagacccgctggcctccaagtctgtgcgctggtactacaggtaatgaccaccccagccctgtcgtagagagaggctgcagaaacttcactttggttgaattcacacagtaaccccactagcaggcccgggcataagggtggatgtctatttttaacaggtgaaaactgagacacacatacctttcagctgggagtcacactgcgaacatgtgacacaggcagtccacacctttaacgtccacgctatgcttttgcctgtacagattctcttaggcattatttttatataaccttgatttaaaaaatatatttttggctgcactatcactccccatttcagagttgtctatctgagagaacacagacaagaggtgctaattacctcgtacttcatcacatgtaggatatgctataagaacaaggataggcgcacatgcattacttatggtagtacctcatgtcaggcctgagctaggcatgggtcttaccctccctctggtccttcaatcaccataccaggatgggcacttatgcccatggggggactctaagctcagtgggggcccagcatagaagagcagcacttggtctcagtttatcatagtcattagtttcagagattagtctaactccaccctggaacttttggggccagataattctttgttgcaaatagcagtcctgtacattgtaggatgtttagcagcatcattgacctctacccattagaggcctgtagcactctcccccagccaagttgtggcaaccaaaaatgtctccagacattgccaaatgtcccctgggaaaggggcagaatttttgaggctcatgtctgctaacctccgtcatttagctttctgctaaagctcatgctaacttgacttcataaccagtaataattccatgtctttggaactgttgcctgaccacccccttgggatgacgtgctcacctctggcttccagaagaactggccccgggcaaaaggagagccttgtatcgtgactaaccttaactatgtctgccctacccccactggagtgtgcccctgagggcaagagcctccttgagccatcttggtgccactgagcctcacacagagcctggctaccttgcatgtgacagtaggtgtgcgttgactgaacaatgattgaagctgttaccagtatgtgttttccaattgtctggggtttgtttgagactcttctcaggtagacaatacctgagccccgcatcaagatgggatggggggagctgtgccttcccactgaccacacctgatgggtttggctggatagatggactacaaaaaggaatgttgcagagggaaaactaaatgaacccatgcaaatatttgcaggggaggaggacaggaattataaaggctttctgttttgattgtttttcgccaccagagcaagaaagctttctgctcagccatggctacgagtccacgccttaatgcaccccacagccagcggcagtggcagtgacaacagcgggacctgcctttgaagatcggctgctgcaagggttgatggctggcatgtcgcaaagaccccccagcatgtactggtgtgtggggccggaggagtcagctgtgtgtccagaacgtgccatggagacgcttaacggtaaggacagggctgtgcttatgcctgcctgggtgtgacctgccatgctcatcctgcagggtgtctaggctatgtaagaacaaggagttctcaaccagtggaaatcaaatgtccatcatttggtgctctttcatcatataatatatcttgggactcttaaattctaaaaattgaggaacagtgtacaaaatttattgtggactcacagatcttaacaattgggacatcacttcatgctgggttaaagaacttttaagaaaaaggatgtagttttgttttttcattataaaaataatacatgtttattaaggaaaaattgaaaaaaataatttaaaaaaaaggaagaagggaaaggaatcatccagaatcccgctatctcaaacacaagtacaatgagcatcttggcatgttctctcctagtctctgcttctctgtgtttaggggactttgttttaaccttattgtacttacaaggtgtatgtaatgttgcatgttgcttttttctcttcaccgtccatcagtgacatttgcttagggcaccacctggctcccgcaatcaagtgaaacatcatttcatttattttattttatttttttacgatttaataattggatcaaaaaatgattcataaattgggcagtactccgaaccaaaacaaacatcattatctgcgggagtgctatgtgcagttattgacctaatccttattctcctgtgggacatttgggttgcttctagttgtttactcctactgagagcatttccttcccatctcttcatacctggtttcaaggttatttctgtaatgcaggtttacagaagttgaatgattggtcttgaacatcgttaagctcttggcacgtattttgccagattttccgctacacttgcaccacctttaagaccaataggatatcatcgtttacaaatatttgtcaatcccttagtatgtaccaggcactacatgtacaaagttcagaactttacgaaataatgtcataaaatcctcacgacaacctggcacatggtacttttatttccgttttatagctgaggaacatgagggtaagagaagcctggaaacgtgttcaaggtcaacaactcagaaatcacagaattgccatctgaaccctgtcttaatgctgcaacactcattcttaaatgctaggccacactatgggaggtgaaagggtcaacaggttgggtctgagaggcccacgtttgtacccttaaccgtgttaactaacgatcggccactgtacctggcttggcagacactttgttcagttgtttgagtgttttcactccatctgaaatgtccagcagctgaccagggtgatgtttctggaaggtgtcgtttcacatccatcacattatgaaatgggaaacgaatttgcttcttgacattgcccagcactaaatctttccagagtgttcaacttgcatctttgtaaattttctttttctttgtattagacgtgtgtcttttttcagttgtgtggtaggaagaccttgctctgttggtgtgagatcgaggtggcgtgggtgatagaacgcagtccccgatttgggggtagcacctccacctttccagtgcacgtgaggctcccttatcctcctgctgctcctcttcgcagccctgagggacgagggtggggacagggaccttgggtctgtttggggcctgtagggtaggtgactgtgtcatctgaaaaagcccacaggaggcgctgctccctcccctcctggtcaacagttggtgatctaaaggagtgcttctcaaccacggcccacacagtcactgggtagtggctcaaaccggcagggccctggcaccacctggacccactggagcagcatcttggggcaggggggcggggagtgaacaagcatgggtaattttttctttttcattttctttctttcttttctttttcttttctttttttcttttttttttttttttttttttgagacagtgtcttgctctgtcacccaggctggagtgcagtagcatgacctcagctcactgcaacttccacctcccaggttcaagtgattctcctgcctcagcctcctgagtagctggtactacaggcgtgcgccaccacgcccagctaatttttgtatttttagtagagacgaagtttcaccatgttggccaggctggtctagaattcctgacctcaagtgatccacccacctcagcctcccaaaggggtgggattacaggtgtgagccacggcgcccggccagcatggctaatttttcaaagttccctagtgattctaacgtgtagctaaagttgagaatcaggccatctaaatggtttgagtcccatagagcagcacttctcaaattatcaggtgcacatgtcccctggggatcctgatgaaatgcagaatctcattcaggaggcctggggcacagacagcctgcgtttctaggtccccagggatcccccgttgattcttacaggtcccagggaccggggcgcaatgggctttggacaaacccatccccacctccaagctcgtggcaggacagataaccagaaaatgttaaggtgttccgaaaggccaaagtgtggcactccccagcccccatgattctccctaaaggcctgcatctgagcttggcactgctccttaggaggtgtcctctcctgactctgctctgatggcctctttccccagtgggatctcaggaatccctgctatccctgttctgtataacccaagggacacacacaagggccaaggaccctgacgtgacctcagcagccttcactgtgtactgttcaaggagcttgaagtagggacaggacagggaagtgacaccctgggaacccctgagaatgagggaggtgtttgtgcagtgacctaatacagagaacacagagttgaagaggagaggaagatagcctgaaacaccccagaaagttctgtcccctgtttagcattaagaaaattatgttacatgttaatgaattacaataataaccaaatcctcataaggaatctggtgagaagctactaatttatacccatactcagagttttaaggtcccacaggtggtaccagcagaactgagcctgtgagccccagccctggagctcactaacagaagttattaattccagggactaaagcctacagtgctccctctgtaaagcccaattttaacgcattgcatgttggatttcattttcgcagaatatattaataaatgtgtacactaagactacagccaaggagcaggtaatgctcaaagggtggcgtgtggccacgtctgtgtgctgggattgcagtcactgtgctttgctcatcggtgctgtttatgtttcctgcaatatctacacattgctttttgttttgttttgccttcttttgcatccagacgaataatattgcaagttatttttaaattattgtttatttaagtactgatgatttgtgtttagaatctaaacggtaaacctcctgtgcttacatccaaagttagatctgcctccactggcctctttgccttgaagtctttctggaataaatgcggaatacttgacttactatgactgcagctgatccccccgcaggactcaccctctgcacatgtccccagagcctaagctggatttgtcccatcccaccttctcctagacttcctgggatgatagggagccctgtttcccctctcccaccccccaaatccaccagcctcactcagggaacactgttcaggcctaatttccagctccggctgagaaaagttggccgccagaaggaaaactaacgacactcaaaattatgtagggacagctttctcatgctttaaaaatccttggaagataacgtgattgaaaacgacgacgttcttattatacttccacgtgtgcgttagaaaaagacccacactttaaaaaagagtgtctactcttgggtgttggggtaatggtatttttaattttttatttgtgtactaggcacgccttttcacaccccctacctgttgtgacttgcgtgacctcagctcatgtttgtttacaatggttaatcctttcaaagcccctggatgtggggggctttgcccagctggtgtgaggctggggtctgtgtgtgtctgccctgccgtgcggcccgctgtgtgtttgtgcaacacaattgtgtcccaggaaggtgtgtgacaatctcaacctcattagcaccagcagcagtcagctcgcctgcggtgcaagaggaatggttggaaagctttgatgggcgtagagtttgccagctgacagagcagctgtcaatgagatgctgggcatgggctgcaggacgcgcattactttgacaaacatgtcattagatgttcattcttctgagtatgtctgacaccagccagagtggaaaaaccagtcccgccagccaaggagagctgtcctggaaagtagagaagtcaggaaacttccacataattcaggtggagaatacttgggaagacttctggattgcggagggtgggtggaacttgagcagacatcacccaggcagtggctcgcccccccagctctctgtgagtggccgtcgcttcggtcctgaaagccctgccacagtcacacacctctcagagcactgcccaccaccggacccagcatggaccaaaggaggagaaggaacattccagaagttcttcaaatcccaggttgtttcatggctacttccaatgtcttgtttttttctcctttggcttttgcgaatctgtatttgaaatacaactccttaatataggagctaagaggtttgctcaagtagggtctcttcctgccttccagaaatagaactaggaaatagatcaaattaggaagagcctctagggtggcagccagccttcttgtcaggccacagcaggaaagtctacgagggacagatccccagtgatgagccagcccacatctctgacctgttcctcctgttggattcctgcctgaacgtgctgggctgtgttcacaccgtgagagccacaggaaacagggcaggcagggccttgcagggaaggagattccagcctggctgcaggagttcaccagcccctccagggagcacagccacgtctggtcaggaatcttttaatgagtgaggagaaggacagggaagctgattggtggcccaggtggcaggcgaggtggctgtgtgcgtccatccatgcaggtggcagttagcacagctgtgcttcatgcttacaaagcagaggccagctacagatgctccaggcccttgatgagcctttgaacattcgttttaacctgaggcttagatcttctcctggttacttgtctggaatgtgcttgcttacttctagcaatggggagctgactccctagcaaacaacgccagcctttctgtgggcagctctggtaggaagtggatgctgtggggctctctttgcaccaggctttattcatttagacagatcggaatcccttaacccatttcttggagtcactaaaagcagatgtgttgccctccctgcagattcctttttaggctgagtaagccatcccacggacaggccgccggcaactttacacgttccgcttggatatccaagagttttttgacttctcagtctgtctgtgggctaattattaggccatacacacctgggtccacagggagagctgcccctacctgcttccccaccctgccgtggaccggctttcaggagcacccccactgatccaccccatcctaggtggcccaagcctgaatgtggtagctcaccagagccccagtcctcaccccctccctggcctcccccaccccacacttgctcctgacttggcctcctttatgtggggtgtgcagggcagccctatctggtggcctctgtgcttgctagggagcagcccaggctcacttggcatgcattcagccaccaagagagaagattttcttaccagccatctgccctggcccccatgaagagatcagtagcctgagagcagggagatgtccatgtgggcctccccaggcccctgtgcagagcgacaaggattttcacccctcctggtttgcctgagtcagactttgaaggagccatcactagggatttttatgaaattctttagttctctgggaatggagccctcccaccactcccaatgccatgtaagtctaaacttgagtgtgtgaattgcacgcacatttttggaaagtttgatgaatgaaaataagaagctgctattattctttggaagtcccaattctgagtcccttcactattcaggccacccttgggttcagtttgtccagattccacttagccatcttgctacttattgggtgacatttgtcataaaaaagaaacgagaaaaccgaacagaaacacatatctcaagcaatagagtccttcctgagctcatcacccccatgctgcacaaagaagcacacattaatcagaacttgtattttcaactgtaaagaacttttgaggattgcagttccttttgctaatgctgctggggttgtgcctggcgacatcctctcatcctccattcaacatccagcacccaggggccgtggcacattgccaaatgttggcttaaaatcacctacctggtcgtttcaggagaaccgagaacaaaaataacttacgtgacactttgaacttttcagtgactcagagatatttaaaggcagagaacatcttaatcgattattttaaatatgaagccatgttacgatgcaaatttgaggttagaaattgaatgtaagtggacaggaatggctctctgaagttcctgttagcagcttagtttggacttgacacagccgtgtgaactcagagaggcaagtgggtggtcacaggtggcccacacctgcagggttagagatggaaggttcagggcctcgatctgctggtggggctggcgcgggaggccagggcagggctcctccagtcattctgcccccaccccagcttccaggcaaaaatggctccagtgggccgtcactccagtctctgtgcaaccttcaccagcacccacgggttcaaaaataagaagcaagcgaagaaccgctgcctgacagtgcactatgagcattctcctggtgcctgactcctccctgaaggttaagaaaaaagttatttatatggaattccacaattcacacagtggattgacatgataagagaaagccacagttattcttggccccctttccatcatgcccatgggtaatcactgttagctgagtgtgttttctttttgtttgtttgtttgttttgagacggagtttcattcttgtcattcaggctggagtgcaatggcgcaacctcggctcactgcaacctccacctccagggttcaagcgattctcctgcctcagcctcctgagtagctgggattacaggcactcgccaccacgcccagcaaatttttgtatttttagtagagatggtgtttcaccatgttggccgggctggtctggaactcctgacctcaagtgatccactcgtctcggcctcccaaagtgctgagattacaggcgtgagccacagcacctggcctgagtgtgttttcttcctaacctcttccaaagcacatgtatggttatctttgtatatatttctggttttacatgcatattcagttgtacatactattgtacaacttttttcccttgaggatgtctcagagttccctctatatgcaccacatctggtgtgaatccaaccatctttcatcaatgtcttattaaagggtctttagattctttctaccttttgcttctaagagttgaatattactgcatatgccccagcagaatggcgggatcacagaacaagcacattaaaaattatcaaaggaaggcatacccctggttaatgaaggctgtcagacagaagggactataatataggaaaagcaacaaggccctgccccagtgtcaacttcccaaaagagttgttatttcctgtttctggttttagttcttcaggtaattatcatttctcaatgtaaagaagatgcctgcacctctctattgctgatccgttgaaacagtgcctgttgacttcctgccataataaatgaatatttccttcccttttgcaccccatctatctgctgctccctctgcatttcattcttttggggctgactcatccctaggttacatttgtgactttaaatgacatgttcccttcgtgatgacgagtgcctggagacccagtgttctgtggagccctggagatgagaatcacccccttccctgctacctccatcggcctcccgcctcccacccaggactcttactttgcacctttatttaattggaatgcatcagcaagaaaatgcctaagaaaggcctcctgggaggctcctgcaggagactctgtgttcctgagggcatctttattttgccctctcctgcgatctcaattggaatcctctgcctttggaaccttctcccttgtcctctgatgtggtgtgattctcactgccctgtggtgacctggttttccctttcagaagctttcagaatcttccctgtgtgcttggtcttccaaaattttccaacgaaagacctgggtgagggtcctcttccattcctgctgcttggcactgggtgggccaagcatgtatccctttcatgcatgggacatttcttgtattttctttgataatatttttctcttctgctttcgctatagttttgttttgtttgtttttctggaactcctattaattaagatacaggttgcttatcttttcgctcacattttccaactgttgttctttttcttaatgtttataaacttttgaccaggtccagtaacacactggtaatcacagctctttgagaggctgaggtgggcagatcacttgaagtcaggagttccagaccagcctggccaacgtggcgaaaccccgtctttactaaaaatacaaaaattagccgggtatggtggcacacacctgtagtcccagctactcaggaggctgaggcatgagaatcgcttgaacctgggaagcagaggttgcagtgagctgagatcacaccactccactccagcctgggccacagtgccagactccatctcaaaaaaaaaaaaaaaaaaaaaaaaaaaaaaaagatttgcttgacttcatcttctaacctgtctattgaacatttcattttggaactcagtcttaatttccaaaactctttcctgttcttggttgtttattttcatagcgttgtgctcctgtgttttgtacacagtattttcttgaatttcccagaggatcctaattgccatttattttattttattttggtgtcagtcttatcttctcagttaatttttatttatttatttaagatgtcaaaatcatgtattgaaaccaatattttacagtgaattccagacaaatcaataattatatgattcaaagcattattagggaaatttgcagtcagctgactttataggcaaagaatgtctataaattacatagaaagcaacttcctaggatactaagtcagtgaaaatgctggcagaaaaatatttttcactggcacttatttttgaagttctttttaatgacctctgcattctctacatttcttctaagccccagctttgtgtttgtctttattaattcagcatgattatttcaaccattcttaggcatccacttgtggaggacactgttccagatgctggggacacagcaggagtgtggcctctgcccttacagggcttccagttgtagcaggaaaagtagacagcaaagaacaagagagctgagcaaggtagctcatgcctgtaatcccagcactctgggaggccaagcaagtggatcacttgacttcaggagtttgagaccagcctggccaacatggcaaaaccccatctctacaaaaaaaaaaaaaaaaaaaaaaaaaattagccggtcgtggaggcacacacctgtggtcccagctacttgggggtgctgaggtgggaggattgtttgagcctaggaggcagagactgcagtgagcagagatcacaccactgcatttcagcctgggtgacacagcaagaaactgtctcaaaaaaaaaaaaaaaaaaaaggaaggaagaagaaaaccagagagtgatgctcaatgaagcattagagtaagatcatgtacaaaagaggcacagtgtggccattttgatttattattaggtaagacattgatgttgaatctcaggtctgctcagttgaccagaaggaggcagccacaggaaggctgggaagaagagggtttattgaacatactgaaaataacagagaatgatctgctcagccctccctcttgtgcctggtcttagtcctacactccaggctatgtcagagcctgctatggtcagggctctgggaagccaggaaaatgtcctcatgatgtttctattccagcaggggaaacacagtaaataaacctgcactctactgtcaggagtgaacagggccatgacagaaatcaaccaggttgcagggatggagagtgacaggcatagggcactactgctggtcagagatcagggaaggtgtctggggggaggtggcatttacacagaatgaagtgaatggaatcaggtcagtcctgtaaaggagctggggaaatggtgctcctggcaaggcatcagtgagtgcaaaggctgggcagcgggaatgagctcggtaggtttgactgaccgcaagatggcctgtgcagttggggcagagtgagagaagcaccaaatggggctggagaggtaaagccttcacagcaggagtgtagattttgttccaaggctgatggacacatctgaggagctgcatggttttatttagggaattagaaggctattgccagagccctggagagaaggcaccaggagggccaggatggtggggtagcagtgggaggaagagaatgcactgggaataggtctcaaaataaagctatcaggacttgtgtgggtatccacacacaagtatgtaacaaaccaccctatcacttgctggcttaaaagaacaacgaatgatcatttcccaggtttctgtgggtcaggaatctaggcagggcccagctggtggttcttcttgcttcactcccatgtctggcccctccgtgctcctccacatgacttctctctcttccacacaccttctcatccaccgcatgtctagcccaagcttctttacagcctactgccgaattcttggagtttagcagcagaagcctctaggcctcccaaggcataggcctagacctggtacagcatcacttcggccactacctgtgggtcaaaacaagtcaaaggccagtccagatttaggccggcacaggaaatagactctacctcctggtgagaggagcaggctttgatacgggttaggtgagtgacgagtaaaggaaggagggatcaaagatgtacccatcactcagatttaaccaacattcgttattttgtcatttttgctacaaagaaaatattttaagaagtcaaaccttacaggtacagccagaacgcctttggatctctccctgatcactgctctccttcaactccaggggtagccattattctgaagttagtctgaaccctttatggctgtatgtgtgtgtgtgtctgtaaatacatggtatcatttctgccttgccaggtggattccccctgggctaccatctattgcgcaggggttggcatgaactccacaatgtcatccactgagattagggaataggctttattaagagaaagaaaatcacaaagcctgaatctgcaagatggcatggcatgtggcccccagcctctcctttaacaagaagctatgccagggcatctactggatagggctggatggggctgggttctactccagccaagggtccagcctgggtcttccctctcagagcccagcctgtcaatagcatgctagctgtgggtgctggctgcttctatggggcaacttggggtctgtgggatgtgcagtcctctatgatgagccactagacccatgggaaactgagcttgggtgctatcacttcagctgggagaaggaggcatctcagctggctcattgtccagctgtggtagggatggggtaaccagagtcctgttttgtcaatcctgctcctttcagaacagtttccatactaaaaatgttggattaaatattttcatactatgccagtctttttgcatcttgcttcttcaaccaacataagtttgataatataagtatgtcctatattttccaagaagcagaatacatcactttgcctataaaaccatacaggcctggtgctttttaatgggtagatgtctcactattgattctctgtctttaaaggttataggtttatgtaaatgttctatttcttcttgagttattttatgcaatacaatttttagatagttatccatttaatctagattttcgaatattttagcatgaagttgataatggttcaggattttaaaatatatttttaaactatcttattcatttttaatagatgaatcatatacttacacacaatttaaaagaagtacaaaagggaatacaataaaaagtacccattcccgccccctacccaaacttactaccaattgccgtctcttccaaagaatcagggctactatttagttccccttttttattggcctcagaaaccacagtttttaggcctggactcaaaatggcacatttttctcttttcataagtctttagctacgtggaactttaaaatgttatatttttgtcttagatttctttttttaaaatgtttatttatttatttattattttattttatttatttattttgaggcggagtctcactctgtcccccaggctggagtgcagtggcgcgatctcagctcactgcaagctctgcctcccaggttgatgccattctcctgcctccacctcccaagcagctgggactacaggcgcccgccaccacgcccggctaatttttttgtatttttagtagagacggggtttcaccgtgttagccaggatggtctcgatctcctgacctcgtgatccgcccgtctcggcctcccaaagtgctgggattaccggcgtgagccactgcgcccagcctatttatttctttatttatttacttacttacttagagacagggtctcactctgtcacccaagcaggagtgcagtggcgacctctcggctcactacagccttgacagcctgggctttagcgatcctcctacctcatcctcctaagtagctgggactacaggcgcacaccaccatgcttggctaatttttgtattttttttttttttgtagagatgggggttcaccatgttgcccaggttggtctcgaactcctgagctcaagcaatccacttgcctcagcctcccaaggtgctgggattacagatgtgagccaccacacccggccactttttaaaattttttattacagaaacttttgaacacagtacacaagtagagagaatattaaaatgcacccctttgtacccattacccaatttcagtaattatcacacatgggcaatcttttttttaaccctcttgtttttagttgacatgtaataattgtgcttgtctatgggatacagagtgatacttggatacatgtatacaatgtgtaatgatcaaataaggataattagcatatctatcaccgcaaacatttttcatttcttggtgttgggaacatgcaaaagccactcttctagctttttgaaaacagaccacaaactattgttaactcgattccccctccagtgctctggtgcactggaacttactcctcccatgcaggtaacccaccttctgccatcctccctccttcccccacatggccaatctgcatccatgtaaacccccttctctctctttccagatgatttagaacccaattccatacttatagcttaagaagtctagaaaagaaaaaacaaaatacatttaacatacgtttaaatgtatgtttaaaagtgtatgttaatgtatgcccacaatagcatgctgttgacaggctaggcttctgagaggggagacccaggctggacccttggctggagagggccgggtgtggtggctcatgcctgtaatcctaggactttaggaggctgaggtgggtggatcacctgaggtcaggagtttgggaccaacctgactaacatggagaaaccccatctctactaaaaatacaaaaaactagcgaggcatggtggcgggcacctgtaatcccagctactcgggagactgagacaggagaatcgcttgaacccaggagatggacgttacagtgagcccagatcatgccattgcactccagcctgggcaacaagagtgaaactccatctcaaaataaataaaaaagtcaaaatatcaaatatctagtcagtgttcaaatgtcctgcattgtctctgtttttatcactggtttgtttggggcaggtttgttgagtcagtgcccttgcatgctgggacatgggacagtacagttcctaagtctcttaatttctatctttctccctcaatttctttttcattgcagtttcttttgttgataaagccatattgtttgtcctttgcaattttccacagtctggatttttggcaattgcatttctatgtgtggcctgacatgttcccaccttccctatgtttttgtagatccagaggcctgattagatttagtaagatgttttggcaaaaatgcccaatagatggtgggttcttcctcctgcatcacctagtcacagaatgtctaattgtctctctctgatgtttagagttttttaatgattttcagtggtgtcagcgcaatcactctttataaacgtcctaatggtttttcgacttttcacacaatggttttatcagtcattgatggttgcttagatcaattatttaatttgaggttgcaaagtggtgttattttaagtctatcttaccttcttcatttatcagctgaaagtgatctctaaagaagaaatttcttccattaactctgtggtaccctgagttacagtttgtacagcaaagtcggggtaaatagttgggtttttttctcttagttttcttattcattctactgaaaataagtcaattccctagcaccttttgaaggcggccaatgaaggtggggttttttttccttagtatcattatgaactcatgaattttaatttatttgattcttgatgctaacgctgttcctcttttgccagtaggccccctgagtaggttcctctatcttttggcatgaccccagaagtctttgataacttccttgctttctgatgtgacaagacatccagggccagattgtccatatcctgccccggatgcacgatgcactgtttctccaagaatccctgtgtcctttgctgatgatgccatgattttaagttctctaatatagttttatctctttgtttcagataatgcttttgtgttctcacatgtcctgctctctctctctctctcattttgttgttgatcagtctttccataagattgtttatttcactagtccttcattcttcttttttctaaatttactcttcttgactagtatcctgtcacttctgaggactcatatttttgcaacttgaaaattattcttatttatttaagtatatgtttctgaaactctcattagacacattttgaaaaacttcaaaaaatatcttcaatgtctctcactcttttatctctgctcccggcctccttgtcttttggtgctgcatcctcctcttggtcttccagattcctgatttgtccttcaacggtgtctctgctctgcagctcacccactgtgcttcacagtgcaactcttctcgttttaattcccaagagttttagttgattcttgtttgtggatgctgcatcctcctgtttctctccaagacatcagtaatatttattctgaattcattctcgctctgctaacattaattctgtgtagagaggggccctggaggtgctggaaagctggagcctgagattctgcttagggaagctcccatgctaactcagtcttttcctccaagataaggatgaacagttgacaataccaagctgtgttgtgaatcaggaaagcccaaagctgtcttatctcagtgactgtgtgatttgtgtaggtttgccccgaacagtaatgtgaggatgcagcaagatgtgcaggccctctgacctggctagaccctgccttgcagagacattgtcactgtcagctgctcacttcctcctggggactctgaggcccaagggggacagtggtgaaatatgacacagcttctcccctaggtgatcagactgcttccaatgagcctgtgcccttggctacataaagaggaaacataaatattttctgtgtgtgtgtgtctgtgtgtgtctctttgtatgtgtgtctgtgtgtctgcatatctatgtgtgtgtctgtgtgtctttgtgcatgtgtgtttctgtgtgtgtctgtatgtgtctgtgtgtgtgtctgtgtgtgtctgtctgtgtgtgtgtctgtgtctctgtgtgtgtccgtgtgtgtgtctgtgtgtgtctatgtgtgtgtgtctgtgtgtgtgtgtctgtgtctctgtgtgtgtctttgtgtgtgtgtgtgtgtgcctgtatgtgtgtgtctgtgtctctgtgtgtgtctgtgtgtgtctctgtgtgtgtgtgtgtctgtgtgtgtgtgtgtgtctgtgtgtgtctatgtctctgtgtgtgtgtgtgtgtgtgtgtgtgtgtgtgtgtgtgtaaggtgggatgtctcttcctgctgatcggtggcctgcctgtgtgctggcttggttagaggagtttcgtgcttctctttatggcgctgctcttcctcagatgcttgcgggtgcctgggtggatgctgactgttctgctcgggattccccgtagctgtctgtgaacacagcatttgtcacaatagcctgcgaagaggagggccaggggactgtagcaggctgccttggggacatccagagcatggcttccgggtggtgggctccgtgtgcctcctgggagttgcccagcacactttctctttagcccacatcgagtgtagacccatcagtcccaggctgcctggcacaagctggagaggggccagatccacaggagtctgcccactatggctccccactcctcccagtcgccctgctggtgacctggggaccctcttgcttcccatgtcccccagcagcctcggagctctcccaagccttctccacctcacgcacagtggattccggtcttctcaggtcacttcttttcccatgctaataaggcttgttgatatttgtaataatttctaaggatttggagcaggaggtggtggctgcagccgggctcagcctactgtcttgatctcatcttccagcgtctcctgggcatctccaaggtgtgcacttgcaggaaatactgagtgagaatgtcaagaaccggctctacagtcggaaggaaccgggttcaaatcctgatgcttccacagctagtcctatctgtgacaggggcagggttagaatctgtttgcggaatggttagcaccatactaagtgcacatgctaggcagaccctcaaaaaaaatggcctgttctttttctctttctctgttgggcaaattatgtagcctcaactggactctatttctattagggaaaatgataataatattacaatgattaaaaagtagggtccttacaaaatggtgagtccgattttatttggctctaagctagagaaggcatggctcacagttatggaagacatggatttaaaatgtggccagtcttcatttccaaatgtgtgtacacgaaagtgtgatgaccctcaaatctaatcatcaaaattaaagctgtttaattaacattttaaattaaaatgtttcaattaaagtccaaatctttccttgccttatcttcagaatgctttttcttttcttttttttccaaattacaaaacctgtatgtctcactgaagaaaactggtacagtgtgaagttcgacaattcacggagtaagcaaggctgacgatgggtgcccggagtccccctctggttctgttggtagcagccttgggtcctcatgaggcctctctgctcacagtgggcgggtggggtgtgcactcacccggagacggcctccatgtccatgctgaacaactcccagggttctccatccgccagtgcttactgatcaacccgtagtgctggccatcccttttcaacaagtttggaaggtgcttttttcccggttttcacagagtaactcagaagtgacttaataaaaatatgcacaaactgtcttggtatgttccaaattgggatcttatataaagactcctgggcctaaggcaacagtctatgtaaagtgaattatttcactttcttaaaatagggacaagatggcctgcctttccttcaagtgtaattttaatctttctgttttactccaagggggtgtaacagcttgctgagtcattgttttctgcctttttaataaaaattaattcagtgatttagagtggaaattctgccccctcccttgggcaagtcactgactctctggggacctctttctttatctgtaagcagagctaatactagcatctgatggggttaaatgaattaacctaagtgtttcctttgaatatttactcactgcctttacaaaataatgtttctattctcactttctcccccaaatttctacaaaacaacaaatttctatctttgttgttattgccatatgatttctaaaaatttaaataaacaagcagtagctttaggaagttacaaagataaactatcagaaacttactgaattggatcttagataatgtccctttttacttggttctttttttttttttaagctaaaaataagtttagttcctcctcagttcttggcatttttgtgatcatttgtttgcaagtgatcgtatcttttttttttttttgtcactcaggcaggagtgcgatggtgtgatctcggctcactgcaacatccgcctcctgggttcaagcgattctcctgcctcagcctcccaagcagctgggattacaggcgcccaccagtatgcccagctaatttttgtatttttggtagagacagggtttcaccatgttagtcaggctggtctcgaactcctgacctcaggtgacctgcccacctcggcctcccaaagtgctgggattacaggtgtgagccaccacacccggtcgtgatcccttatcttaaatgttcagcctccagccattcataatgaatgccttgaacacaggtcagagaaaaatcatgaagcggggctgttagtgaggtttgggtgggcatggggcctcacagtggggcccagacattctcagagtgtttcagttgctgaggaatcatggagcttcttgctttaatatcaggatattgctcatgaaaaaaaggaggagacctattgttgttcagccagagcttgtactaaatggaagtagtttgcaccatacacaagcaggcttctccatccaggaaaaagatctgtgactgcaacaaccacagcgcagcattgatctaactcagctatgcaccaaaaacccagctgcagagcagtgcagcacccaggaaatgttaactctcgctgcagactgaggatcttctcagagtttgtatcttaggtcgaaggggtggggtaggcaagctttcacttctgttcagcattatcttttacaaggatgggtttgtggcatttgctttaacctttcggaggctacactgtaatcactcactgggttcacctcaaatcctcacatgatagacaccagcctacaattctaccagctacggaggactcctgatcttggcttttttgcttctattttgtgtgcttgcttttgtgtttggaaggcagatggcagtcctagtattgagacaaatcagctggagtcaatttctgttgtttgaacttgagggtatatatctcagcctggaagacatgcagaggaaaaggaagaaaacatgacctcatatttgttcccttgccaatatgttaaaactttagttgtttgaaaatgtcatacggtcttatggttcaaaaatcataagtatcgatctacaatcctgagattcttacatccttccagaatcttttttataagtaaagaagcaaaacaaagatagagtctgatttttcccctcttttacacaaaatgtagctgatcgcagatgctgttctgtgccttgcctgtttctttcacacattaagggtgtcattggcctccttttagtcaactgcatagtgttctgtgacatggatgcaactcagttatacaggcggtctcctcttcacgggcatttgggcgattcctaacatgtgctgtaacaaataatgccagatgtctgttcccatgtatagaagctcatctatacaacacattcccaaagtgatgggtcacggggcatatatgcttcgaaaaatctgacagatgttgctaagcagcccttcaggagagtttttcctgtttatgccccaatccctgaaaacatgtgtgcgtgtctgtttcccagtggctgacaagtatttattaccaaatgtttgctttttcctaatgtgatatgtgaaaaatggtacctcagcctagttagaatatgcacttctcttacgatgagtgtgaccaagcatgttttagcatgcgtaagaagtagctatatttacttttttaaaaactatctctgcagagcctctttttttttttttttttttttttttttttttgacagagtcttgctctgtcactcaggctggagtgcaatggcacaacctcggctcactgcaacctccgcctcctgggttcaaatgattatcctgcctcagcctcccgagtagctgggatcacaggcgcccaccaacacactggctaatttttgtatttttagaaaagaaggggtttcaccatgttggccaggctggtctcaaactcctaatctcaggtgatccacctgcctcggcttcccaaagtgctgggattacaggcatgagccacagtgcccagccttcatattctttattaatcaatttttgaggaactctgattttccttatcaatttctaggcgctgttagtgtcggcacggtatctattcgttgttaacctataattagatgctctatcaagatctatctaagaacacagaaaactgaaatgaaaactttgaatattcaaagaggctatagaggaaatacgctgcttttttctcttaattattaaatgaatatgttaaatataaaatacttaggggaaatagcggtaaatatatcaggcctacctaagaacaccttaaactcttgacataaaggatatttgagtaagaaaaataacatatcatcttcttgtgtaggaggacttaatattgtaaatatatcaattctccacaaattgatcctatcatttaatgcattctcaattagaatacaaacaggatttctttttggaacatggaaaaagtataataaattttacctagagaaataaacctatgagaatacaggaaagttcaggtggggaggggatggggtgagaggaggggaggagattagttgcagcgtatgctaaaatttattccaatgccaccataatgactggggttggagactagcgagacaatgcacagagaaagcaatggaacagtgtggcaatctgaaaataggccaaaatgcacattgattttgccttgctagttagaattataattagtccaggaaaggtttatttgggaatagcataggggtaacatattgctttctcactcccactccaacatcattttcagatggatcaaatctatagcatggatgcaactcagctatacaggcagtctcctcttcacgggcatttgggcgattcctaatatgtgctgtaacaaataacgctagatgtcttaagcataaaaatcaacaccactaaaagtctaggaaaatgatgaaactaaacagttttggagtaaaggatatttttctaagcacagcaccaaacctagacatcataaatttaggagaacttgaatgaatgttgaacaacataccaattagaactattcagtagcaaagcccttcttaagtgccagtcaacgaataggtagaaaactattttcaacacagattccaaagagctcttttccttcatttgcaaagagcattaacaaaaagaacattccaattttctttctttcttttttctttttctttttttttgagacggagtcctgctctgtcaccaggctggagtgcagtgtcacgatctcagctcactgcaacctccgcctcccagcttcaagcgattcctctgcctcagctgggattacaggcccgcaccaccataactggctaatttttttgtattttagtagaggcggggtttcaccatgttggccaagatggtctccatctcctgacctcgtgatccgcccgcctcggcctcccaaagtgctgggattacaggtgtgagccaccatgcccaggctccagttttcaaatcaaacaaaacacaggattaggcagtttaatttagttaatagaaaaaaatagaaacaattgataaacatagaaaatacactgtgcccattcctatggaaagaaatgcaaatgaaaaccaattatgagatatcttattctgttttacagattggaaaaatcagaaagtttggtattatttaatgtagtaagactatcgttttgttctactttatatatattttttattctcaatattttaactcaatattggagttaataattgaggctatcttgaaaagaacttattgagcagaaattggcaatatttattaaaattaggactgagtatatcctctgctccttccgctgctggagattttatagttgctacgtgggcagaaacgcatatgcatttcccaggatgtttatgtcagcattgcagagactaaggaaaaactggaaatgccctaaatgttcatccatgaagacaggaagctatcatgaagaagagtgtgctagatctccatgtgcctatgcagaagaactttcaagcaggaaaaacaagatgcagaacatgattatcgtataatccatttgttaaaaaagtagaggaggagaaatgaatatttatgtgagatccagggaaacgtgagctgctccatgacctttgtctgcacagtgatgtattcaaaggaaactccagcctggaatcttaaaatcaacaagcagctgaagtctttaagacagttgcttgacaaggcatccacggggaattccactgaaagcacacagacacactgctgaactcctttgcccagctcttcccaaaaagctcacaaaatacagtctctgtcatcaatcttaaacctcgttctctcaagaaagctcccaggtgctacccccaaagccagcttgtcttgttatgcatgtaggtttctgtttctgagtctgtcttcctccacatctgccctttccaatgcagacacctcagcccctcggcaccccttccctgcctgcccagcaccaggaaggtgcacttggacttccttagggtaaaggaggaggcagaggcggccagatgggacacctcctcatgggtttcgtccccgccgtttgaatgtgacttatgaatgcacggaggtcatgaaagggatgtagttttgctaagtattggtaaattcccctccctgtgggttgtaccattttgcattctctccaccaattaaagagcatgtttgtttcctcatattaaccctttgtctatacgttgcaaatttttttttctaagtcgccatttgtctttttaccttgtttctgtgttttgagatgtggagttggagtttttatccttatatgtttaaatgttatgtttggccataaaacaagcctccataaatgtaaaagaatggaaatcatacaaaatatattcggtgaccacaatagaaagaagttagaaatcaataacagaaagaaatttgggaaattcacaaatatgtagaaattaaacaacacactattaaagaacgaatgtgttaaagaagaaatcacaaaaaaacagaatatactttgcgatgaattaaaacaaaaacacatcacgctaacacttaagggatacagctaaagcagtgctcagagtaaaatttatagcagcagctacctatatgtaaaaaagaagaaagatctcaaatcaataacctaaacttccaccttaagaaactagaaaaagaatagactaaaccgaaagcaagtagaaggaaggaaataacaaaaattagagcagaaaaaaataaaatagagaatataaaagcagtagggaaaatcagtgaaatcaaaagttagttctttgaaaaaaccaacgatttttgttgacaaacctttagttagaatgaccttaaaaataaaaaggagaaggctcaaattaccaagatcaggaatgaaagaggaacatcgctggcaaccttatagaaataaaaaaagattataggaaaatactgtgaacaatttgcaccaacaaattcaataacctagatgaaataaagtcctagaaagacacaaactatccaaactgactcaagaagaagtagaaaatctaattacacttaaaacaagtagagagactgaattagtaataaataaataagtaattccccacaaagaaaagccaggcccagatagtttcactggtgaattctaccaaacatttaaagaagagttaacatcaacttcacaaactcttccaaacaataaaatatggaagaatacttcccaattcagtctatgaaaccagtattaccctgaagccaaaaccagaaaaagatctcacaggaaaactacagaccactacctctttcaaatatagatgcaaaatctcaacaagacactagcaaaccgaatttagtaacacataaaaaggattatacgccatgaccaagtggaatttatcttaggattccaagcttggtttaacatcaatcaatataataatccatattaatagaataaaggagaaaaaatatatgatcatctcaatagacacagaaaagcatttaacaaaattcactaccctttgatgagaaacactcagtaaactagtaatagaaggaaacttcctcaatctgataaactgcatctgttaacaaaaaaaaaacccataactaacatcatacttaatagtgaaagactgactgctttctccctaacatcaggaacaaaacaaggatgtccactctcactacttctattcaacattacactggaggttcttgccagggcaaagacaagaaaaagaaatgaaatccaaattggagaggtaaaactatattttccggtgacatcatactgtacgtagaatattctaaacaacacacaaaagacaattagaactaatagttcagcaaatttgcaggatgcaagatcaaaatgtaaaaatcaattgtggttgtatgaattatcacttaacaatctgaaaatttaattaagaaaacacatttacaatagtatccaaaagaataaaaaatttgggaataaatgtaacaaaagaagcgtaagatttatacaccaaaaactgcaaaacattgtggaaagaagttaaaaagaacctgaataaatgaaaaaacattctgtattcatggattggaagacttaataatggtaagatggcaatactccccaaattgacttatgcattcaatgcagtctctttaaaatcctagctgaaattcttacaaaaatggcaagatgattctaatattcaaataaaatacaagagaatggctaaacctataaaactcttaaaagaaaacaggattaaatctttatgaccttggattaggcaatagtttctcagatactacaccaaaaacacaagcgacaaaaggaaaaataggtagtaagttggacttcatcagttaaaaatttttgttcttcaatagacataatcaagaaagtgaaaagaacctgtgaaatgggagaaaatatttccaaattatttatctttaaaggacttgtatctgattatataaagaactctcacaattcagcaacaaaaaaacaacccaatttaaaaaagagcaggccgggcgcggtggctcgcgcctgtcatcccagcactttgggaggccaaggcgggcagatcacgaggtcaggagatcgagaccatcctggctaacacggtgaaacgccatctctactaaaaatacaaaaaattagccgggcgtggtggcgggcgcctgtagtcccagctatttgggaggctgaggcaggagaatggcgtgaacccgggaggcggagcttgcagggagcagaggttgcgccaccgcactccagcctgggctacagagtgagactccgtctcagaaaaaaagagcaaagggtctaaacagactaaatagacatttatccaaagaagatgtgaaaatggccaatcagcacatgaaaagatgctcaacatcattaatcattatggaaatgcgaagcaaaaccaccatgagataccacttcacacccaacagaaaggacaacagaaagacagatggaaaatggcaagcggtagtcaggatatggagaaattggagcgttcattcattgaaggtgggactggaacatgctgcaggcagtttggaaaatggtttggcagtttctcaacattttgaacatgcaattaccatatgacccagcaattccactcctgagtatatacacaagagaactgagggcagatattcacagaaaaacttgcacataagtgatcacggtagcattattcctaataaccaaaaagtggaaaaacccaagctcccatcagctgatgaataaataaacaaatgtggtctattcatacagtggaatattacgcagcaatagcaaggaaataatagcattactagcaagtatgaattaatacttaataattaaataataaggccgggcatagtggctcacacctgtaatcccagcactttgggaggccgagacaggtggatcatctcaggtcaggagtttgagaccagcctggccaacatggtgaaatcctgtttctactaaaaatacaaatattagccaggcatggtggcatgcgtctgtaatcccagctacttaggaggctgaggcaggagaatggcttgaacgcgggaggcagaggttgcaagtgagctgagatcgcaccattgcactcccacttgggcaacaagagcgaaactccatctcagaaaaaaaaaaataataataataataataataaaataatagtattattaagagtaagtactaatatatgctacaacatgaataagtcttgaaaacatgctgagtgaaagaactaagtcacaaaaaccatattgtattattccacgtatatgacatgttcagaagaggcaaactgtagagatagaaagtagattagtggttggcagggacctggaggaggaagtgggaactgactggtataagcgtatatttgcagggtggtacaaatgttttaaaattagaaagcggtgatagttacacaactctgtgaatatattcaaacccactgaattgtacacttttaaatggtgaattttatgatacgtgaattatctctcaataaagctgtgatcttttaaatgtgaccgatgtatccatcttttattacttctgggttgtgagccacagttaaaggggttatacactcccaggctaaaaaggaatttgcctgtgttttcttctaatgcctacatcgttttatttttttacattatatctctaattcatttggaattatcttggtgtttcacgggagtaacggatctgatcatatatttttccatgtggctatccagttggacaaacaccattgattagcccactcttctttgtggggcccttctcacaggacctgactcctgccctggcccactctttcctctgatggagacagcattcaatcccagcatacctttccctggaaatggtatcaaatgcttgtcaggctttcaggtacatccacgttttatcacagtaatcattcccatcagtgatttttatggtgattaaccagacaattaactcggctgcctccaggttttaagtctgcgtcataaagcttacatcttacttgggaatattactgggcattccttatgctttaagcaagatcttttaacagaatctattgaccaaaattaactctagggccactcatttgaatgttggctaatctcattaagcagcatttttattcacttactttacagttttattgaggtataattgccaaataaaaattatatatttcatgtatataatgtgattatttgatatacataaatgttgcaaaatgatgagcataatcaagttaatgaacacatctaccatttcacataattacctttgtgtgcccgtgtgtattaacaacacttaagatctactcttttagtaaatttcaagtatacaattcagtattattaactatatactcaacaggctgtacattagatccccgaacttactcatcttataactaaaagtttgtacccttcaaccaacacctccctatttctcccatgccccagctcttggcaaccaccattcactctcggcttctttaatttggactttttaagattccacatataagtgagatcatagagtatttgtcttctgtgtctggcctatttcacttagcataatgttctccaggttcacccatgttgcaaatgacagaatttacttccttttaaaggttgtatagtattccattgtgtgtgtgtatgtgtgtgtctatatatatatatatatatatatatacacacatatgtatatgtatataagccatattttctctctccatctgtcaaaggacacaggttgtttccatatcttggctcttgtgaataatgctacataccgttaatatggggttacagatatctcttcgagatactgatttcctttcctttgggtaaatacccagcagtgggatttctgaatcatagggtagttctatttttaattttttgaggagccttcatactttttcccataatggctgctaccttacattcccagcaacactgtatgagtgttcccttctccttgtcaacatgtgttatccttgtcttttttataataatcaccctaacaggtgtgaggtaataacacataggtttttttgtttgtttgtttgttttgttgttgttgttgtttgagacacagtctcactgtgtcccccaggctggagggcagtggcacaatctcggctcactgcaacctctgtctcccaggttcaagcaattcttctgcctcagcctcaccagtacctgggtctacaggcacacaccaccacgcctggctaatttttgtatttttagtagaaatgaggtttcatcatattggccaggctggtctcgaactcctgacctcgtgatctgcccgcctcggcctcccaaagtgctgggattacaggtgtgagtcaccgtgcccggcctaactcatgtttttaatttccatttccctgatgattagacgtgccgacaaccttttcctatacctttggtcatttgtatgtcttcttcggaaaatttttattcaggtcctttgcccattttaaaaatcaagttatttagctttttttgctattaaatcatatgggttctttacacattttgaatattaaccccttatcagatatatggtttgcaatattttctctcattccataggttgccttttcattttgttgattgtttcctttgctgtggtttttagtttgatgtaatcccatttgtttatttgtgctttggttgcctgtactttcagtgtcatataggaaagatcattgccaagaataatgtcaaggagattttttcctatgttttctcctaggagttttactgtttcatatgttttaagtctttaatttatttctagttaatttctgtgcatggcataagatatgggtccaatttcattgtcttgcatgtagatgtccagtttttttcgacactatttattgaaaaggccattcttctccattgtgcattttaggcacctttctcaaagattagttatttgtatatgcatacatttatttctggactctccattctgtttcactggcctatgtgtctattttaacacatagaccaatgcatacaattagaaccatactgttttgcttataatttgtaacacagttttaaatcaggaagtgtgatgcttctagctatgttctttctcaagattgctttggctaattgggggtcgtctgtggttccatacaaattttaggatttttttttctatttttgtgaaaaatgccattggaattttgacaggaattgcattgagtctgtggatcactttgagtagtatggacattttaacagtattaatgcttccaatccatggagacaggatatctttccatttatttgtgtctttttcaatttctttcatcaatgtcttatagtttttagtgtatagatctttctgcttcttggttaaatttactcctaagtattttctgtagctattgtaaaagggattgttttcttaatttctttttctaaaagcttattgttggtgtatagaactgcaaatgattttttgtatgttgattttgtgtcctgcaactttactgaatttatttattagttctaggagttttctggtggagtctttaggttttctgcatataagatcatgtcatctgcaaacagagaccaattgacttcttcttttcttatttggatgtcttttatttctttttcttacctaatttctctggctaggacttctagtagaagtggcaagagtgggcatacttgtcttgttcctgatcttggagaaaatgctttcagcttttcaccattaagtatgatcatagctgtaggcttgttttatatggcctttatgatattaaagtacattcctgctataaccaacttgttgagaatttttattttgaaaggatgttgaatttttactaatgtttttttctgcatttattgagttcattatatgatttttatcctttattctgttaatgtggtgtatcgtgtctgttgatttgcatatgctgaaccatccttgcttcccaggcttaaactgaacttcataatggtgtatgatttttttaatgtgctgttgaaatgagtttgcctgtatcctcttgaggatttttgcacctaagttcagcagggatattggtctgtaattttcttttcttatggtgtttttatctggctgtggtaggaggtattgctaatcttgtaaaacaagttcgaaagtctttattgtcttcaatatttggaagagtttaggaaggactggcattcactcttctttaaacgtttggtagaattcacctgtgaagccatctatctgattctgggctttttattgttaggaggtttttgattacttcctcagtctctttactcattattggcctgttcagattttctatttctgtatgacttatttttgataggtagtatgtttctaagaatttatccatttcttccaggttatctaatttgtttgtgtataattgttatagtagtctcataatactttgtacttctattataccaattgtaatgccccctatttcatttataattgtatttatttgagttctctttcttttttttcttagtctagctaacgatttgtcaattaaaaaaaaaaactcttactttcgcttttctttccttttttttttcttttttttttttttttttgagacagaatctcactctgtcacccccaggctggagggctggagtgcagtggcacgatcttggctcactgcagcctccacctcccgggttcaagcaactctctgcctcagcctcctgagtagctgggattacaggcgcccacaaccacgcctggctaatttttgtgtttttagtagagacagggtttcaccatcttgaccaggctggtcttgaactcctgaccccatgatctgcactccttggcctcccaaagtgctgggattgcaggcgtgagccaccatgaccagcctgatcttttctattatctatttagtctctatttcgtttatttctgctctaatacttattttctttcttctaactttgggctcagtttgctctttttctagttccttaaagtgtaaagttagtttgtctaattaagatatttctttttgcttaatgtaggcatttctggctgtcaactttcatcttagaactgcttttgctgtatcccgtaagttttggtatgttgtgtttccttttcgacttgtctgaagatactttctgatttcctttttgatttcttctatgacccattggttgttcaggagtatgtggtttaatttccacatatatgtggatttttccattttcttcttgttattgacttctagttttacaccattatgataagaaaagaaacttgataatatttccatcatcttaaatatgttaagacttgttttatggcccaacatatgacatttcttggggaatgtcccacgtgtgcttgagaaaaaattatattctctcgctgttgaaggcattgttctgcatatgtctgttaggtctatttggtctatagtattattcaaattcactgttttcttattaattttctgtctggatgatctatctattattgaaagtagggtattgaagtcccctactattattatattgctatatatttctcccttcagttctgttaatatttgctttacttatttatgtgctccaatgttaggtacatacatatttaaaattagtacactcttttaatgaattgacccctttatcattatatagtgaccttctttgtcacttctgacagattttgactgaaagtctattcagtctggtataagtatcgccattctttagctcttttggtttcatttgcatgaaatatcttttgtcattccttcactttccatctatgtgtatgtttaaagcaaaagtggatctcttataggtagcatattgctggttcttggattttttaatctattcagctactgtgtgtcttttgattggaaaagtcaatccatttatatttaaagtagttactgacaagtaaggacatacttttgccaattttttaattattttcggattgttctgtagttggctgttgttgttgttgctgagacggagtctcactctgtcaccctggctggagtgcagtggcgtgatctctgctcactgcaacctccgcctcccaggttcaagtgattctcctgcctcagcctcctgagtagctgggattacaggcagccaccaccacacccaactaatttttgtgtgacagggtttcaccatgttggccaggctggtctcaaactcctgaccgcaagtgatctgcccgccttagcctcccaaagttctgggattacaggcatgaacccccacacccagcctgttctgtagttcttttgttcttttctttctctctttgtatcttcctttttaatttgttgtttttctgtagtaggttaagcagcatttttaaataagggaactatcagagtaaacaattggggcccttcattttggcacaaacatgtatactgaatatttattgagcttcagctgtatgctgggcagcatgcaggaatatggctgtttccactggtatatactgtcctgtctggagttgatgtttgggtgttttggatacgtctgtacctctgctccccagcaagcccagcaagggtgctaaagcaaggcttttgtcttccacttcttggcctcactaacatttgacccatagctaagtaaataagattccaatacccactgacttattcatttgaataggcatgattcatcccagatggctaaggaataagatagaaaccccagacttcacagttttcagagaggggccaaatttctaacttaacttcaaataacaataatagtagctagcatttatctagagcctctcggggtcaggcagtgttctaagcacttctcgtgcttccatccacttgaccctcacaataacccctctgaagtaggtgccaccatccgaagtggagaggacggaaatgtgcagggcctggaggtgggcccaggaagcagcgcggggtcagcatggtggtcacacttctccgtttctctcccgggctctctgtgctctgggacttccttccctgccaacgttttgcagtcatgtatttctgggcagtgtgtatgactaaggtctcagatacttttatgacttggaaagcccccacatattatcttgaaagagtttacattttgacctgatatgaaccctaccactgttgtgctgaagtgaccagaccttagggaagggttggagggggatgtgtggctgagtggccaaaagaaaatcattcttggaaaggaaaatttagaagtgcctgaaggcatcattctcctcctcttttgctgggagaattctgtacccctgtggccgtaactgtagatgggcaaaattatagacgacccccttactaatatgcagagagctctggacggtcaacaaattgaagtggagaggctttcagtgatacagtctagataggcacccacggcagtgagtaagcagaacccagcctgcgggcagccctgggcagagcaggaggctggcagacctactctgcaggggacagtccaggacccaggtcagaccacgtgcaggcggagaaaggagaggcagcccgctgggaaattctgcaagtcctttctggggtgcacccctgcgctaggctagaaggaggagaatttcgagaagcatggaaagcgtaagggctccttccagataaggcagacacaggaacaaaagctaagggaagcttggtccatagaggaaatgagagtgcagtctggcagcctcacaggcacctggagtagggaggaaggggccaggcctcctggaaatcacccccatttgtgtgctcaccgcttctctttgtgtatgtatttttttattcatatgcattgtgcaatatcttttatatgtgccattttcttttacaagaagatgataatattcagacatcttaaatacttgccaaacaccatgctatgtcaaatagcacagctggggcttgaaaccaagtcttccaatgtacagagttcagttcttcctgtaactgcgggttttcacacagttctcagtagatggcatgattggaaaactctcggtgcctcatcctaaatgttcctttcagattgagacattttcttcctttccttgcactcatttttgttgggaggaagttaaatccagttagcaaatgtactttgtcaacctgaaaagcattttttttaatataacaatgttgttatagtagtaatagagaaataactggaaaatagagaaaagggtctcgagaagttcaccttgaattccgccacgtaagaaaaaccagagttatcgttttgggggcttcctccttgacagttttcctgtttgtgtagttccagggtctgtgcattataattgtcaaaatcaccgttctttgctctactgaacagtgctgcaatcagcatctacgttcatattgcttttttttttttttttgcatagtgctttttaaatgtgtagaactattcttttggaatcagtttcccagaagcaacgtggcaatgtcaaagggtgtcctaatcctccagtatttataatcacaatcatcttccccaaaatcggagtaggactgactgtgtgtgtgtgtttatcttcgaattgtaccattttctatagtattactgagtattaaataaatgaactgtcctatttatgtgatttttaattttccaaaaagatggttctcctttttttaccaggtcagtttttgtctgttggctctcccaagtccctcaagcatccccttttgggtaaagggcatggtttctgttgtgggtgtttgaaagtaaactctggaaatactgtagcagcgcacttgagctctttctgtgtgtctcagcaagctgtgtccccagggtccagctcagcacataggaggtactaaatatttgtagaacgaatgagcaataaataaatgaatttttggaagaggaacaaaatctaggaaagaattcatcttcatagctttgtatttctgtgtttctcttcttctacagcagaaaattaatggagggattggtttccatttcctctccgttttttccatctaatgagacagggtcatctcatgttttcgttcccacatttctgccatgcatgttaggtgctgaataagagtctcatgtttggctgttgtcttagttcgttttctgttgctataactggatgccagagactgggtaatttataaagaaaatgaatttgtttcttacagttctgaaagctgggaggtctatggctgaggggctgcatctggtcagggcttcttgctggtggggactggctgcagagtcctgaggtggtgccgggcatcacatggcaaagggcctgagtgtgctggctcaggtctcttttcctattcttataaagccaccagtcttattacagggtccccaccatagtgaccttatccaatcttgattatgtcccaaaggctgcaactcctaataccattacaatggggattaagtttcaacatgaattttggaggggacattaaaaccatagcagttggtggctgggcgcggtggctcacgcctgtaatcccagcactttgggaggccaaggcgggcagatcacgaggtcaagcgatcaagaccatactggccaacatggtgaaaccctgtctctactaaaaatacaaaaattagccgggcatggtggtgcgtgcctgtaatcccagctactcgggaggctgaggcaggagaatcacttgaatctgggaggcagaggttgcagttagccgagatcgcgccaccgcactccagcctagcaacagagtgagactccgtcaaaaaaaaaaaaaaaaaccatagcagttgggaacacacaacctaggaagcagaggatgagctttgatggcaggtgctgggggtccaaatctcagctctgttgttgggagctgggtgggggaagtttctctaaccactcagggcactggtcaccttgtggtgagtgatgatgagaagcctagccttgtatgggtgttgggaggaagtcaaatgcacgcaggacactttctacagcatccggcaggactcaataaatggcaccaatgaccaatacatgaaacattattataaaccattttattttatctttcaaaatctgggacacctgtgccaatttttgttccatgagacttccttgctctccatccttttttctagagcaactgagtcaagattcggtagattgagagcaaacagttgcttcaatatagataataccactgaagaactggttcactaagccagggtgaaacacagttaacattttgctggacatacttcatcttttaatttttttttcttaatttcagcagcaatacaagttactgcaaaaaatatattgaaaaacacagaaaaatagaaatatttttaaaactccaggctgggcatggtggcttatgtctgtaatcccagcactttgggaggccaaggcgggtggatcacttgaggtcaggagttcgagaccagcctggccaatgtggcgaaaccctgtctccattaaaaatacaaaaatcggctgggcgtggtggcaaacacctgtaatcccagttactcgggagactgaagcataataatttcttgaacctgggaggcagaggttgtagtgagctgagatcacagcactgcactccagcctgggtgacagagtgagaccttgtcttaaataaataaataaataaaattttaaaactccagtcatttcatctgctgaaggggacggctactgtaatttttgtgtgtcctttagattttctttctaaacagagacagggagagggaggagaaaagagtgtcaggttcaggttttacaaacaaaaataatagactgtatgtattatctatattcatagactcattagggaccttttctcaaaggattttaatcacaaataatcagagaacctagaataaattatttcattttgcatatatatatatatatatatatatatatatttttttttttttttttgagatggagtttcactcttattgcccaggctggggtgcaatggcgcaatctcggctcaccacaacctctacctcccgagttcaagcaattctcctgcctcagcctcctgagtaactgcgattacaggcatgcaccaccatgcctggctaattttgtatttttagtagagatggggtttcgccatgttagccaggctggtcttgaactcccgacctcaggtaatctgccggcctcggcctcccaaagtgctgggattacaggcatgagccaccacgcccagcccattttgcgtacttttaaatggtgtccatctgtgttctgtgtttttcctgtggtttgtcacggcctctgtcctatgttctacttttagcttgatagctggtaagcattttttcacccttctccttagtcttcattgtcataggttctgatggccgcatccgagccccttattctgaagcaccagcaggtattaacttagaaagccgagtagcagcgactctgtgggccccagcgtcaggatgcttcccctccggctgctcgttgccagcgctgttgttctgtgaacctgtgtcactgtcttggccttgttcctctgtaaaatggcagcagagtcacctccttcctagcgctgctgtagacgttaagtgacgtgagtccagtccccaggcctgtgctggcccttgggcaccaccctgctctacaccactccctaatccttggcctgggccgcttgtctgcagagttgctcttacctcggctgtggcagggacctctgcagaagtcctggctcgggagtagtcttttagtgtgcaccgtgtcatttctgtagggaaatgcctagaagagaaaaccgtgggagaacaggccgacttcccgcttttgttatgtagtactgccctcccgctttctgaaatgaccatccggttggcaaggcctcccacgatggccaatggaccagaggatgcacccatttccccacactcatgacagcaaggaatgttataagcctttcaatgttttactgtgtcaggtggacataacatagcatcttgtgattaattatatttttattactaaagcaaatagcacttttccatgcaattttcccccaggagaccaacctgtctatatgtataaccatccatctccctcttattaacaaaaattcctagtgatttggtgagtatatccacaaaatggtaatctatgccgtgaagcatttctgcagtgagaaatgctagcctctgggccagaactgttagtgagagcccgcagagcccggccctggcttttgctttcctgtctgatgcgggtggagggcctgggtgatgggtgcaatggccctgagcacccaccatctggagaggaattatcaccgcagatcaccccggggctgggtgaccctccctcctctgcacacccccaacctccacatctttcccaaagacgtcaagggttggatttcaccgtaatatgacccagagatgtaaacggctgctgatgctgaaacgctagagtgatatctggtgaaaaaagaagcatccttccagtggaaggctggcaaagctagggcaacagagggcgagcccccaaagtgccaggagggtgtcacctcccgggaaggccagccccgtttccctggtgctttggccacatggggactcagtggcacaggaaggtcgttaaacaactatgaccaggtcagtagcatcctgaagtttacttttgtttgttctgcaatgagctgtgggctggtagatcattttcactttttgctgctctattgacggaggcaaatgcaataaaataaagtcatggatatgcaaatcaaacggcagtgtcttttctaagatttacagaggatgtcacacacttcagattgaccaaaaacatttgccttttattctaagtgttttccttggtggggagaagagaaatacacacacacacacgtgcacacgcatgcgcgcacacacacatgaggccaacatttagaacttacataattaaagccatttttttcatttcattttctctattttcctagatttgtagggaaaaaaaacagtacaaagagaattttattccaatgattgggacaggagtgatgacttaacaattattgctctggaacaaaatgtaagactgtctccttggaacataaggacagacagaaccagggatggacagactggggcggtgtctttcaaggtgtacctgcagaacagtgagctgcctgccgtcagagacacggttgtcacagccagcattactctgtcatattcatggaattctgttttattactctttcagaatactgaaaaagaaaaataatttctgttagtttttctgtaattagaataatttgttttttctgaaacatgagttatggaaatgatgtttaaagactgagttattggcagctaaaatcacttcttcttgaaatggctgactgtgaaacacacagtatcactgaaggtatttctttaaaaatagtatgttaaattgaaagcaattatcaagaactaaatggtgttcaggtcctacaggtttttaaatattttatgttttttctaaccaaatgcttctttatgtaggaactttaacttaccatccatggccggcacattgaaataccagcatacagtgaagactaacacttatcaacaaccagaaatatgttcacttacaagctcagagcttattgtaaatgtttcttgtcatcttgaatggctgcacatgtgctgactccataaccctagctattcactgcatttataatttcattttccctaaccagttcctacttctaaccactgcctttaaaaatcaaactagcaacaccaaccaaacctgaaaaaaaaaatctccctggtgctattcatttatccttctcctcctttacttcgttaaatacttcattggaatgtattagctttacattaaaagcaagtaagatgcctgaaaatttggaaattttcatcaccatatatgaaaataatgacataaattataatttagagaaccaaaaggattttctaaaatttgaaactgcattatagcaatgttctactattattttcctactagctctagctacttatttgggacattaatgtgttattgaaatagaatgtttgctccattttattttttaatatgaatttgaaatctttatgaggaaaatatttagaactgagatattttactgtataaaagaatataattatggataatagttgatgaataagcacaagtaactgaataatctcaaatagtataaatgtgtttcctacattttaagtttaaatcaaaagttaccaattctcaaatacaaaacaatagtattttggagaaaaaaatgactaaataagtattatctctaggaaaaggtgcagaagttctaaattttgatgaagcctaatttaacaatttttcctttcctggttattgttttctgtggcggtgaggaggggcttttgcctttatatttatttctgaactatttaattttttttcagtgagaatgtgttctttcattacttttgtagtgtctgtaaagttttgaatgaagcagtcatatattcccatcacgcaggtcttgggaaataaagaagaaaaatcttttctagttctgtcatgaagtcccccatggcccatgcctaatactcactatggtcaaagcatttgggtcttttttctttcaatttaaataaaggttaaccattctctgtataatttcaggaaattaaatgagattggcagattaaattaaatgcatacgcattaactggtgccttttcctaatgtccttccaacaacttgattggaccagaccctcagcccacagggtcggtgagagtggatatggtgtcaccctgcaacttaagaaagtcagagtcgaaacagataaacaccacaacatttttataatgtaaagaaaactgagcaggttctagattcttattacatcatttactccacacacaaggcatgattgaaaaatcaagttaaatcacccttgtaatctcatgggcaccttatggcctacatatgccctaagttccaccttcaaaatgtcccttaacttgggcttaaaggtttagctgtttgtatgtatgttcctaacatggacagaagaggctacttcatacctgcttgtgcattcacacatacacatacctgcacatgtcttttactggataagcgggtatttgtttaattctgagagacaagcaatgacataattaagtgcccccatctgagggatgacagcagttgattctattccttctgggccctgctaatggcctttctccctctggcctgctctcacatgtcccaggggctctgcctgtaaataattaatggtgactgttaatgtgtgttgggaagtgaagctgccttattcacacgtataaccgcttacacaccaagccttttcccgattcctcttttcaaaagcacacagccaagacacaataatctccactcagacacagcaattctgtgttggcatctcaggaatgatacagattgtgtgtgatggtcatccatttacttggattttcaggacgattgcctttgaaatggagcaagtcatggcttagcgtgagttgtaaagaccctggattggtattaggggctttgctccgtaagcagcttgccttttttctttctgcagagcaggatttttcctgggagcaggattttccaaagggagctctttggtggcaagagctcataccttgtgtcatatggcaagccatgcatttggagtatagacattaggactcatattttctcccaacattttgttatgaaaaatttcaaacatacactaaagtagaaagaattgaaccatctatattcatatacctaccactcagatcacaccattaacactttccaaaatttctctcttgcctttctatccaaccatccactcatttttaatgcatttcaaagcatattgcaaacatctgtacacttcactcttaaatactgtagcatgcatagtatggactaaggttcaatattgtttgtagtttttttaggtaaaatatatataaagtaagatgcacatatcttaaatggactgcttgataagttttgacaaatacagcaactgtgtaatgaaaactccagtgagatatagaaccaccaaactgatgtccttgtgccccatccacaggaaaactcactgtctaccatatggccacgatccacccttctgattttttttcactatatcttagaacagcatataaatggaatcatttttgtacaaggtttctttcactcagcattattttttttgagattgctatcagtctttccatagatcaatcggtccttcctttttattgttgagtagttactgtaccacggtttgtttattcattctcctgtggatggacacttgggctatttacagtttggaaatatgaataaggctgctgtgaatattgttggatacatttctggacatatttctcttggttagataagaatggaatttatgggtcacagggtaggtatacatgtagttttataagaaaccaccagacctgtttccaaagtgattggaccattttgcactctagccagtaaggtatgaacattctggttgctccatgtcctcaccaagtagtgttggccttacagttttagccattctggtgagagcatagtggtatctcattgtggttttaatttgcatttccctgatgactaatgacattgagctttttgaatatttttttgctgtttaaatctttgccctctctctttctttcttccttttctttttctttctttctttctttttctttctttctttctttctttccttccttccttccttccttccttcctcccttcccttcccttcccttttcctttctttctttccttccttcccttcccctttccttcccctttccttccccttccccttccccttccccttcccttcctttcccttcccttccttctgttttgtttttttgagacagggtcttgttctgtcacccaggccagtggagtgcagtggtgtagtcacagctcattgaagccttgacctcctgggctcaagccatcctcctacatctcagcttcctgagtagctgggactacaggtgtgcaccaccatgcccggctaatttttaaaatgttttgtagagacagggtctacttgtttcccagactggtctcaaactcctaggctcaatggatacacccaccttggccttccaaattgctgggattacaggtgtgagccaccaggtccagcctgctcattttcaattggattgtttgtctttttattatggagttatacgagtttttatattctagataccatttattttcagatatgttttgaaaatacgttattgtagtctataatttgcctatttaactttaaatggggtcttttgaggggcagaagttttaaattttgatgaagcctaatttagcaatttttcctttcctggttattgttttctgtgtcccatgtaagaaagtaagtaaagacttactctcaagtcatgaagataatctccgctatgttttcctagaagcttcatagttttagcctttatgtttaggtccatgattcatctcagttattttttcttttttttcaagtttttttttcaagttcaggggtacatgagcaggatgtgcttgtttgttacataggtaaacatgtgccatggggatttactgcacagatcatcccatcagccaggtattaagcccagcatccattagctattcttccttatgctctttccccaccctccctcaccacaggtgcccagtgtgtgttgttcccctcttgtttccatgtattctcattggtcagctcccacttataagtgagaacatgtggtatttggttttctgttcctgtgttagcttgctgaggataatggcttccaactccatccatgtccctgcaaagtgataatcttattcctttttatggctgcatagtattctatggtgtatatatgtatcatattttctctgcttttttcttcttttttttttgagacagagttttgctcttgttgactaggctgaagtgcagtggtgctacctcagctcactgcaacctctgcctcccaggttcaagcgattctcctgcctcagccttcataatagctgagattacaggtgcccaccaccacgctgggctaattttttgtatttttagtagagacggggtttcaccatgttggcctggctggtctcgtactcctggcctcaggtgatccacctgccttggcctcccaaagtgctgggattataggcatgggccaccgcatgagccaccgcacccagccaccacattttctttatccggtccatcactgatgggcatttgggttgattccatgactttgctattgtaaatagtgctgtaatgaacatgtgtgtgccatctcaagatgatatttgtatatggtgagaagtaggggtcagggctgctttttattaaatgagggtgtccagttgttccagcactttttactgaaaagactttgcttttcccattgtactgctttggctcccttgtcaaaaatcaattgaatgtacaagcacaggtctatttttcaaccctctgttctgtcccttggagccatttgtctataccagtaccatactgtcttgattactatagctttgtagtttgttttttggaaggataatggcttccaactccatcctttccaagtcttgaaatcaggtagtgtacattctccaactctcttctttttcaagattgctttggctattctaggtctttcaaatttccatataaatttaagaatcagactgtcaatttctatcccgcaaaaatgaccctattggaatcatagttgggattattgaatctatagataaaatcaaagagaattaacatcttaacagtactgattcttccaatccttgaagatggatgtcttcccacttatttaggtcttgttcaatttctctcagcaatgttttatgttttcagcgtacagatcttgcccatcttttgttacatttttttctaagaatgtaattttatactatcataaactattttttcaatttttcaatgttaactgctattatgtgattcatttttgtgaggtgtatgtttgtgagccaaccgtgctatgcatttacatttaaaaagaaaaacaaggccaggcgcagcggctcacgcctgtaatcccagcactctgtgaggctgaggtgggtggatcacttgaggtcgagagtttgagaccagcctggccaacatggtgaaaccccatctctactaaaaatacaaaaattagctggacttggtggcgtgcacctgtaatcccagctactcaggaggttgaggcatgagaatcacttgaacccgggaggtggagattgcagtgagccgagatcgcgccactgcacaccagccttggaagcagagtgaaactgtgtctcaaaaaaaaaaaaaaagaaaagaaaaagaaaaagaaaaaagaagaagaaaatcaatccaaagcctgtcttattcatcctttcagagaggcagcacaaagatgggttgggtttagcttgagagctgggagaccaaacttctgtcccagtttgcctctactggctgcgtgaacttggccaaggatgatagtgttgaagtcaaaataaaaatgtagaggtgaatttttatttttattttttatttgtacacatttgtggggtgtatgtgacattttgttatgtgtatatagtatgtggtgatccagtcagggcatttagggtgtccatcacctgaatacagtacatttttgttaactatagtcaccctactctgctatcaaacattgaatttattccttcttactgtatgcttgtaccctttaacccacttctgttcgtcctccctgctccgacactcacccttctcagtctctgttagctgtttttcccatttttccagtctttgcctccatgggatcaaatttttagctcccacaaataagtgagaacatggaatgtttgtctttttgtgcctgcttatttcactcaagataatgacctccagttccatccctggctgttgcaaatgacaaaagaattttttttttttttagacagagtttcgctctgtcacccaggctggagtgcagtggtgcgatctcagctcactgctacctcaggctcctgggttcaagtgatcctcgtgcctcagccacctgagtagctgggattacaggcgcgtgccaccacacccggctaatttttgtgtcttcagtagagacggggtttcaccatgttggccaggctggtctcgaactcctgacctcaagtaatctgcctgcctcggactcccaaagtgctgggattacaggcataagccaccacacccagcctcaaaaggattttaaaatctaatgttttcttgggatataagaattgtaatttgggatatatatatatatatatgagagagagagagagagagagagagagagtgtgtgtgtgtgtgtgtgtgtgtgtgtgtgtgtgtgtgttttggtatgtttgaagaataaagagaaggttggcagttttgtaataaaaaggagaaatgttatgtgtgtttttcaagaaaacttattagtattagcaaggttttggagagttggcaagttatgatgggtgagtgacagttgtgggtaaagctagttttaaagtcgttttagtagttattagataaaactggttttagttgtggtaggcatttttagtagtcggacttgtagagaatcatgtttttggagtcatgttatatgccccgagtgctttttcttcttggcttctcagctccgttttagttgggtgtaaaaacaataacccaatttgcttggtcacctttcacaacagtattctttccctatttctgctatcactccacacagtcagaattcaactgctcatccatcgcagtctttccgtaatacctatggagagaaagctttttactgttgttccctaacctctttggaaatctggtagaagctttgaattttgtcctcgaaaaactgtacacacacacacacacacacccagttttgtgtacaattttagggtgttcagggaacttcggaagcctgtcagcctttcggggtccacaggccctcactgtgaaccccttctagagtggaagctcggggagggcgagaggccgccttcctttccctcggctcctcctgcacccagcgagggctcggcctgccgtggccgccccgtgagtgaccgccgcttttgctgaacggcccgggcgctgggtcgcggcctcccgcaaggctggcctctcctcccgagtggcagcaggtgctcggatgaccgggagcagcccacgctctggtgaagcagcgcgacccgaggcccggtgtcgtcccccatcgttacgcagcgcgttcgtgccagggcaggtctggagtgagggcggctgatttaaatcccacgcccttcgtggggttttctgggcagggcgggaaagcgtctggatgtccacacccccgggaggtggcctgtctttcccccgtgggcaccgcagcgggacagcgtggctgagacccgcggctctctcgccaaagcccctgcgcctccgctgctgtcggcgaggtcggcccggccgctcccccgcgggccgctgtccccggtgccctggaagggctccaggtggcggtctcgctgcagaatcctccgagctgcgctcgccgcccggtgccttcgcagcggccccggttgggttgcgggtcgcggggcggcgagcgcagggagcgtcgcggggccacccctctctcttcctgaagcccccgcgatcgtgcaacgggccgcgccgcctcctgctgtgttccacggtgattctcaagagcacgcgggcagtgggcggtgacgccgtgtgtgtgtgcttcctcccgcgcaggtgccggggacacgggcggcaagccgtccacgcggggcggtgaccctgcagcgcggtcccgcaggacggaaggcatccgcgccgcgtacaggcggggagaccgcggcggcgcccgggacctgctggaggaggcctgcgaccagtgcgcgtcccagctggaaaaggtaggggagcgcctgcccctgcggccacccatgcagccccgggctggacgaaggggaccgctcagatgattttctcgttattgtcataacggtaatgggcgtttttactgtgttctggaaacgcctcgctttgcgtataaacttgtgggcgcctttcctttccaactgacttctcagtctgatatcacctaagcaggcccctgccaccttttcatgggaggcctttgagggacgggggtgtggtcacttaaatgtaaagaacaaaatgccacccagaggcttaacctactctattcttttacgtttttgtcgttataaaaagtagcacatgctggaaaaataaaatttagaaaatatgtcaaagtaggaaaaatgggacaaaaaagttaccaaattcctgatacaccctaaaacccacttaacagttttgctgtattttcttccagcctgccgatctgagcatacatggttgttgttgttgtttctaatatagatgcagacagattgcatatatggtgatgcagctgctgctcgtacttttataacattattttaagaattttccagatgattaaaaattccttgtaggcgtctccttcaatggctacgtgacactccatctagagggaccgtgtctacctggctattcatcttggctgatattaggattgcttctcatctcttactaatataaacgatgctctattgaatgtttttgcctcattcttttcttatggtaatgttattttcttagcatagatctgcagggattgagaatgtggatatgaggacttttaaagttttggaatacatgccaagctgttttccaaaaatcttctacagattaaccctcccagcaaaagttggagtggaccatcaccacattttttgcccctgtgggggcttcttactggctattatcatgaaaataccttaaggatgttttatttgcatcactttgattaggacaggcttaacatgcctccatttaattgatagttagaattcattcaattcctaaaactccaacctgttctcagaagtgtaagagattgggagaggggcagtacagcatgcttgggaattgttaagcagaaggaaggcatttaagatccctctgattaggaattcatggtggatatggaaaaggatcattcttctgcacagagagagctgcgctgtgcacacgagcaggtcagagctgtgggctcctcgggtgcaccccagtggcctcaagcagggaggagctgggcagcaaacacagcctggcatccctgccaagtggccaagcagccagagatagtggctcattccagagctgtgcagattcagggatgtggcagcagcaggagatgctgacgggggaagatgatcatggagagacctgagagccaagggggatgtgacttcatcctgagggtggaaaagctgttaaaggcagtggcatcataatttggcaaagagcactctggcccatatttgaataaaggaaaacagagtccagggtgtgtgtctcttctctgtggcatcatggacagtggcaactcaaaatcgagaaggttcctagaaagctgcctctcccctgaatacaggactgatgaaatcccagctgattggactttgagaagacagtgaggaaaaggatggatacatctgtgttttcataaaaatgtaaaattatagttccaaaaaataccataaataagagtcaacggttgatgcaaaaggagaaagtatatggctaatacccttcattgacaaagagcttttacaaatcaatatgaaataataacataattttcaaaagggcagcaggacatggaaacagcaaaataaaggtaaagaaagtagaagccatgaaactgtaaaaataatttgaaagttttgaaatagaaagcaaagtagaaagaagtagaaatgaccactaaatcaaaaattggttctttgaagagattaataaaatagaaaatctctggtgagagtaaaagataaaaaagaagaaatagataaatcaggaatataaaagagaacttcatgacagtttatacaagcattaaaaacataataagagaatgtattatgaacaagtttatgttaaaacactcaaaaatttagatgaaatgaacaaataaaaagaaaaatttaactttaaaaagaaacagaaagcatgaatagtctttcaaccatgaaggaaataaatcaatcatgtaaaaccttctgacaaagcaaattctaggtctacatggttttactggtgtgttctaccaataatataatcacttgtccagaaaatagaaaaagagggtgcactcacctgttcctttaatgaagctaacacaacctcaataccaagagtaggtgagaacagtacctggaatgaaaatgactaaggatatgaataggcaaatagacacacacacatctgaaagatattcagatagatggtacacatatgtaaagttattcaacttcgttaatgcgtatagaaaggcaaataaaacaaaaatgaagcagcctttttaagctaatcagattgacaccttaaagtttgataaaaatcagaaggaaggctatgggaacttacacacctttattcaatgctactaggaaggtactaggaatgtgtgcagcctctttggaaggccatctgaaaatgcttgtcaaattttcaaatttcattatctttgacccagcaaaactactgctaggaacttacccctacagatttacttgaaaaaaaattaccaatttgtatgtgtaaggatgttcattcaagttgtgtttaagatagaacaaccttgaaaactgcctaactgttccatccacaggagaaggctgctacagaaatctcagtctgtcctggtcctagaataccacacagcactccaaaaggacaagataatctctagcagctgttttggaaagaactccagtgtaacttaatgtaataagtgcagaacttctgcttccgggaagatggagggaatatggaggttgtttactttgccctcttcttctcactaagtgcactgaagctctagacgttacatgtaaaacaaacgtaggattctaaaaggtagagaaaagaaggcagagtagctggtggcctcagtactcaaggaaatcacaatagtacgtttttgggttttatttgtatctcatacatcccaaaccagatactgaggaagttggcaatccagaaacacaaactggcacagagaaaaaaaaaaaaaattccaaggaaagcctgctctctccaaccaaagcaccaggaaaggaacagcaaagccaggcaggaaacttacaggcagtcaacaaccctcttcggcaaaacactgaagaaatatacttgcagcccagccccacccctcaccagcaagggccaggtggagagcttagatttccacccttgccaggctgtaacaggcaccccaatcatccccaccccacggtgtcagagaaggctgtgaggagctggggtgctaatccccaccaggtggtgacaacatcccccatcaccatcagtggacagcatgtggggagcctggacttctgtcaccacccagcctggcagtaatgagacatgcattccccatctaactagggcagaattgaagcaggcctagaggagaacctgaagtcccaacgctgcccagcaatagcaaggagcccctgcttactgggtgtcaactgattctaagtacagcccccagatttccaccccaccaggcagcaatgaaggggcatccctgtttacccaccagagtggcgtcagaggagacctgccaacacacaagattgaagtaagatccagagtcttaaaacataaagacccaaatatccaggccacaataaaaaattactcgtaattaccaagaccagaaagatcgcaaactcactgagacaagacaaccaagagatgccaacactaggatgactccaatgttagaatcatctaacaaggatttgaaggcagtcatcataaaaatgcttctgtgagcaattataaatacacttgaaacaaatggagtaatagaaagtttcggcaaagaaataaaagacatgaggagagccaaatgaaaattttagaacttaaaagtacaatacctgaaattttaaaattaaaaaaaaactcaatgaatgggctcaactgtagaatggagaagagaggacaggggaaagaatcagggagaatacagaacagtagaaattacccactctggaacaaaagccaaagcaaaagaaaatagactgaacaaaagaacagagcctcatggacatgtgaggattttaacagaagatccaacagtcatgtcatcagaatcccgggagactagacagaaggcaagactgaaggagaactcaaagaaacaatggctgaaagcttctcaaactggcagaagacataaatgttcagattcaagaagttgaaaacaaacaggatatgcccagagaaatccattccaagctcatcatagtcaagcttattaaaactaaagacaaaacaaaataaaaccttggaagtagtcaaagggaaacattgcctttaggggaaaaaaaatccaaaagacaaaaatcaccaacgtcagaagggaaacacagaacatcactacagatcctgcagatatcaaaaagataataaggggacattatgaacagctctaaacacatacattggacaacttagatgaaagggacaaatccttgaaaagtagaaattacctcaacttaataggaaatgcataatttgaatagccttttaactattaagaaaattcaattcataattttaaacttccccaaaaaataaatttacaggttcagatggcttcactggataattctacctaacatttaaagaattaataccaatgctacatagtcccttctagaaaatagaaaagggaacattttttaacacttttatgaaggctgtattaccctgacaccaaaaccaaagacagtgttaaaaaaagaaaagtacggaccaatgcccattatgaatgtggatgcaaaaattcttcacaaaatattagcaagtacaattctgctatatgtaaaaggaattataagccatgaccaagtggaatttattccagagatgcaaagttgcttcagtttcaatcatcaatcaatgtaatcctccttattaataaactaaaaaagaaaagttaccttatcatatcaattgatacagaaaaaaattgacaaaattcaataccatgtttttcaaaaactcttagaaaattaagaataggagggaacttcctcaattgggtaaagaatattgacaaaaacctacaactaacatcattcttgatgttgaagactgttttcccctgagatcaggaacaaggcaagaatgtccattctcaatataatactgcaagttctattcaagagcaactataatatcattgtatttaaaaaatactattcaatgtatttaatatattgctggcaattctagccaatgcaagaaggcaaggaaatgaaataaaaggcacacagatatgaaagaaataaattaaactgtctctatgtgtggatcacatgacaatctatacagaaaatccataaaagaaatgatttatgaaagaaaaattggtaaactggacctcaccaagattaaaaacttttctctgagaaatacctaagacagtgattctaaaaaaagctacagactgagagaggtatttacaaatcacttatctgacaaaggactcatagctagaatatataaagaactctcagaactcaacatgaaaaagcaaacaatccaaatagaaaatgtatgagatatgtgaagagacatttcactgaggaagatacacagatggcaaataagcacatgaaaagatgttcaacatcgttagccattaggaaaatgaaaattagagcaatgataagatgtcattgcacagctttatgaacagcaaaaataaaaaatagtgacagtaccaaattcagattgggatgcagagaaggggtatctctaatgtgttgccactgagaatgtaacatggtacaatcacgctggaaactagtttgtcagtttctttaaaaaaactagaaatacacttatgaaccagcaattgaactcctgaacatttagtctagagagaggaaacttacatgcacatgaaaacttgctcatgatgtgtcataccaactttatttgtaatggcccaaaactggatacaaccaaagactctcagtaagtggatacttaaacatatatggagtactactaagctatacaaaggagctctcctgaaacacgcagcaactcagatggatctcaggacattatgctgatttaaaaaaaaaaaaagccaatctcaaaagatcatattctctatgattccatttatgtaacattctcaaaatgacaaaattttacaggtggaagagagattagtgtttgtcaggggttagagatggtgaaaaggaagagaatgagtgagactaccatgggtgcgtggcatgagggagaccttttgatggaacaggtgatggaacaggttcgtatcttgattgtggtagtggctactcaagtctacatgtgtgacaaaatgcagaactatatacatacattgtactaacgtcaagtatcttgctacaattatgtaacatattgccatcgggggaaactggatgaaggatactagggttttctcagtactatctttgtaacttcctgtgaatctctgattatttcaaagcaaaaagttaaaaaaaaaataggtaaagtataattccacttttacagcacttaaaaactggcaatagttaatctgtggtgttagaagtcagtatagtggctacacaccatagggcagttactagaaggaacaaagagggcttctgggcacaggtgatgtcctggtctttggactgaggccagttacatgggtgtattcaaatgccttgcatgaaactgaacatttaaaatatttgcatttttctgcaggtgtgcaggtgtgttatattgttgattaaaaggtcataatgaattaagtgaaaaaagcatttggttgtatatgagattacctgtgagtactataaataaatatgttctggaaggcatcctttgcagagggcgactgggaggtaaaggcatagagagaggcctacttcctgttttatacttttctatgctgtttgaattttttcaaatactcactatggagcctccagccagaaagccagctttcaccttttccactgtctgggtccctcttggccttgggctggctcctatgacgtcacttaccacctctagaggatggggcttttaagcctctaaccgaccgagtctagacagctgttagttgtgggcagtgaagcatttaatcaatcactgtggcttttatccataatgcaaatgctttcctggaatgacagggctactgggcctcaccctgggcagagtggcaggtgggtgggcttttcttttctgatcatattgaatgtatgagtctaccgtccttcacctgatcccagccccttagactgttcctctcctcacgtgtcagacatacctcccactgccagcccattcactccactaacagaacctgagccttcctccaagtcccatgtttccaggaagtcttggatgcaacagagactcttgggctttagagctagacacatcccagttcaaactctgagtagttctgctgatgataaactccctaaccatgggcaagcttttatttcctcttccataacatagaaatacaggcacattcctggcatgactgttaggaggattgaatgtggccatgtgaataaagtactcagtccagcatctggcacctggtgagagctttgataaatgttcactccctttcctgggggctccattttacccattcctgcccaacttacctaaaatgatctccaaacacacttgtgttataaactattcagcaagtcaaatgtgcttgtcgggggctgtttatgcatattcccacctcaaacttaattgtaaatctgtggaggccagaaatggcccctggcatcctcagtgcccagtcccacctgtcacacacagtagatcctcagtaggtgttgatgggggcactcgccatccctggcatcctgagtgcccagtcccactctcacacacagtagatcctcagtaggtgttgatggggggcactcgccatccctgtcatcctgagtccccagtcccactctcacacacagtagatcctcagtaggtgttgatgggggacactggccatcccattccaataggggatccccatctacctgcttgaccacactgatgttcaagcccacaggaggcagccagcttccaaaggacttgacatttcagaaacgcaatcaaacacttgacatgccaatctagcagctatctgagcatccttttctcagacccagagagctcgtgataagtcaaggccacttttacactggtcaatgatagccacttactagctatgtggtcttgggcaagctctgaagcctctctgaacctccacatccttgttcatatattaacacatggccctcctcctgggacctttacataccagaaggactggaatgagcaggaactcaggcttaggtccagtttccaccatatcctttccttcctctgggccaccaagtcaagagtccctctgcatgctgctggaggatctttgtcccaggattcagatctgtgaagtcccctggtgtgtcacattccatttatgaatacattgcaggatggttcttcagagagctggttcccttcccccttcgcaaggctgacttaacatgtaccaagtggttactgagctctggctctatgccagaaggggctatgcacaccgtccccttcctcatgaagcaggtagtcgagagcagcaaatgcgagccacatgtatatatcatattttctagtagccacattaaagcagtaaacaagcacacacctataatcacaggtattccggttggaggatcagttgagctcagaagttcgagaccagccctggcaacatagcaagatctggtctctacaaaaaaaataaacaaaattagccggtgtggtggcatgtgcctgcagtcccagctacgcaggaagctgaggcagggggatcactttagcctgggaggtcaaggctgcagtgagctgagattgcactactgcactccagcttgggtaacagagagagaccctgtcaaaaaaaataaataaaataaaggagcaaacagaaacaaacaaataaaatgttaatattatttaacatgaatatattaaaatcattgtttcaacatgtaatcaacataaattattgatgagctagcttaccctttctgtactaggtctttgaattcacgtgtgattttatactctccacctctcacttctgaggagccacatttcaagtgctgcccagtcacacttggcaggtgctgccgttctggacaacacaactccagtcctgctccgggacctggtgaagggtttaacgtcagttgtcttggcagttcctaatagagccagtctcactggagccctgttctgttttgaccagggccagcttctgagcatcccggcagcctatggggatctggagatggtccgctacctactcagcaagagactggtggagctgcccaccgagcccacggatgacaacccagccgtggtggcagcgtattttggacacacggcagttgtgcaggaattgcttgagtccttaccaggtaaatcacagggcatgagctcttaaccgtgtctcagggcaccctcttcttaggcttcaccccaaaatgtttacttcttcatgctttcaccaataatgagatcaagaaatacagggtaggccattgacacccaaacaaagtgaagcttgcctgccagccacattccacctctcactcccatgaactcataagggaaattctcaaacaccatatttcataaagaatgtaattaacattgctttttaaaaaaataattaatagaccttggtctttttagagaagttttagatttatggaaaaaatcaattggaatgtacggagttccagaattaatgatttggaggtatgttaacagaaaacaggtgatcgctaaatcacttacacaagaatatctaggtaagagagacagtaatcatgctagtaacttctattgagatggggacgcatcagtctcaggaggcaggtgctatatttcagaaccatggttttaagatgacgaaaacaaagctcagagaggtgaccctccactgtgcgccctccacatggttttccctataactctgttttgtgttagtgtgggacatttgtgacaactgatcaactaatattgataccttcttactaactaaagtccatcgcttacgttgcaattcattcttgctgttgtatatcccatcggttttgacaaatggataatgacacgtgtccatcatgacagtattacatagagcagtttcactgccctaaaaatcctctgtgctccacccctcccctggccccatccctccctccctccctccctcccctggcccctggcaactactgatcttttttactatctttgccttttccagaacatcgctctagttggaatcccacagtctgtagccgtttcaaactcacttctttcccatagcgatatgcatttaaggtttctccatgcctttttgtgacttgatagctcatttcttttaatggctgaataatattccattgtattggtgtaccacactatgttgcttttgtaggaactatttttttctctggtgaactcaagatgtcctggtctcctgtaatttcccgtggtggtcttggctcagaaacactgcaccagtctaggcaggcatcgctacagctatagggtgaggcacaccctagccatggtctttgggatttgagattttgcttgggagccagggcccacctcttgggtgggagaacatgcagtcacccagggccctgcacctagaagggcccacgttacgtttaatactctgtactcactatcttaaaatgtttcatgatttttaaacaagaagccccattcttttcattttgcattgggcctcaccccttatatagtggtcttgtttgagggtttccagctgtgggctttgatagatctgtgctcagcgttggttccaagctagtgttcccctcatgtgtctgaacagaatgaggttatgggcagaaatcagggcaattttagggcccatgagaagcatactaagacaagacataggagggcagagaggagcttgggtgctcctgaggagccaaaggctgacctgcctcttctcggggagccccaagattagctctgttctagccctgaagagtctgcaccagctgactccgtcacctaatgttagctaatatttattgaatactgtcaagtgctgaaaactgtgtagaacgtgagagacagataatttttttaaagattttcccagccatttagtacctcctggccaagcaggggaaattgaggcagaaaggagtaacactgtgcaatgtaactacactgaggttgaagtatttttacgcagaggtctgggagcacacatcagggggcagggtagggtctccgaagggaggctgacatctgacctgggctttgcagagtgaataggagtttacttggcagacaagtgaaggaaggacttgggttgcctgcttttgcagagcaggaagtgtggctgaacctcgtcatggttttcaactgctcccaggagcatcgtatcttcagctcaactctgagcaaagctgctgaggactgaaggatttcagaccattgtggtgggctttgcagaaagtgcagagatgggcaaaacagtgtgtacccatccctgcacttcctgcaaaggagttcccaagctggaagggaagtcagccatggtcaggagtaagtcaagacaagaagacaaacaagagtcaggctggacatgctggctcatgcctgtaatcccaacaatttgggaggccaaggcaagaggatcacttgagcccaggatttcatgaccagcctgggtaacatagtgagaccctgtatctacaaaaaaaaaaaaaaatttaaattaaccaggcatggtggcacatgcctatattcccaggtacttgggagggtgaagtgggagaatggcttaagcccaggagtccaaggctgcagtcagctatgatcacattactgcactccaggctgagatagaaggagaccctgtctcaaacaaaaaacaaaaacaagaagcagctagagaacaaaggagggtttgagaagaagagggatgagaggttgatgggatgcattctttgaagcacgttgttatgtgattcctggtctctgaagctgagcagggaggaagaggggctcctctgagtgtcgttggccttaggctgtagagagtacctgtaggggttttgtgtggttaagagagcaccctttgattttagacaaagcaaggtttaagtcttgaccttgctatttactaactgtgggaccttcaagaagtttccctgccaggtgtgtcccacagaccctggctgatggatgaaatgagtactcagacacaggtgtacggtgtaagagcagctgagtcactgcctggctctgttggccagagagcagcccgaagaagctagagctgcttgctttcattcagtgcaggcacaatgccgaaaacctggagccaacacaacctgtaggtaattaacatttattgttcccctttcagggaacatcaagccagcagatgatcaaaggtcagttcctggtcaacataagtaaacaagcctgtttaagatacattcccctacactccttgccctctgccttcagctgttctcccccagggctctgcagaagcttccaaactttcagaaggtttgtgtcctttccctgtagtttttcctacgactctgaccaatctcctacatttccaaacctctctgagctttggtttcctcatcttaaaatcatggtcctgaaatataatgcctgcctccaaagactgacacatccccatctcaacagaagttactagcatggttactgtgtttctcttacccagatattcttgtgtaagtggattaggggtcacttattttctgttaacatacctacaaatcattaattctggttaacagtagagggagaagaagggatatttacttggcactggctccagcctcagccctatgctacatgctttatttggtgaatacagggccatcctgaccccggtttcctgatcaatgtcctgtcgcgaaggagagagtcactctctcctcacttgggagcactttgatccctaggactatgtgcctctggaaatgaggcagtgttatgatgcatttgggaagtgtccctgcagaagatgaggtcatttttccatggcaactagacccaaaagatattgcactattttgaacttgaagatattgtaacatttcagcccacactgcccccgtcaattcaatgtgctaagtgttatttcatcctggaattaagtaggtggttctactggggagaaattgtcacttttaggcctgacagatctttcaccaaagcttttattattattattcatgaaagtaatatatgtatattatagataattttaaaatgtgggaaagtgtcagtactttaataatacaatgacacaacatcatgagttagggtttattgatccaggcacttgacatgcattttgtgatgtagtcctcacattaaacttggaagaatgagtattattattccgattttaccaacaggcaaactgaaacagagagagattaagaaatgtgtccaaaattacatactaaattattttatttctaaaatgcctgtctccaaagttcatactcctgcatgtaatgttaccctaggggaggggtgagggcaggggagagcccagagaaaataccacaatgctggggtagttgtttctagtcttatttccacacacccattttttatttggctaagatcatgctggatacgccatttttaatcctccatttcatcactcggcattatctgacaagcaggtgggtgactgatgtggggaaatgtcatatgcaattcagagagactattccagaaaacactatcaactcaacagaagcaactttcagctggaaacaggacagctgggttttgttttgttttgtttaacttttactttaggttcaggggtacatatgcaggtttgttacgtgggtaaactgcatgttgccggggttcggtatgcagattatttcgtcacctgggtaataagcatgggactcaataggtaattttttaaccttcccccttttccctccctccaccatcaagtagtccccagtgtctattgttcccttctttgtgtccacgtgcattcaatgtttagctcccccttataagtgataacatgcagtatttggttttctgttgttgcgttagttcacttaggataatgacctccagctccatccatgatgctgcaaagtacatgatctcattcttttttatggctgtatagtattccatggtgcaaatgtaccacattttatttaaccagtccattgctactagcggtctaagggaagagcagagtgggaacaaacagcacccttcagtggcactttccctttgtcctgccatctcctgccaggtccctgcagtccccagcggcttctgaactggatgctggccttggcttgccagcgagggcacctgggggttgtgaagctcctggtcctgacgcacggggctgacccggagagctacgctgtcaggaagaatgagttccctgtcatcgtgcgcttgcccctgtatgcggccatcaagtcaggtgggtttccccactaccctgagtcaaccctgaccgtgcaaaccatctcagcctccagatgtgggactgtgtctttattctcactcttggctctcaaatcacctctgtgaggagacttttgcaactcctgttctatgtttctttttcaaaatatctgcacccttcctcatttcctccttacttgcccccgcaaggggatttcagtgacagagactgactgtggctaatgggactgttgtacgaggcactccaaagggcaaagccccacagaaattctcccactaacagaaacttgatgcaccaagggaagtaaatagagaagtccaacatgcacaagtaccttttcagtttccattccacatatcagagtctgcccttccaacgactgtgacactagcatctgcatgcccttagctttttggttttgttcctttagggaatgaagacattgcaatattcctgcttcggcatggggcctatttctgttcctacatcttgctggatagtcctgaccccagcaaacatctgctgagaaagtacttcattgaagccagtcccttgcccagcagttatccgggaaaaacagtgagtagtcactgcctgtggagtgtgttttagttccttttgtgctgctgtaacagaatcctgcagactgggtaatttataataaacagaaatatatttggcttacaggtctggagattgagaagtccaagagcatagtgctggtatctggtgagggccttcatgcagtgatatgaaggtggagggcaagagaccaacagactgagagagggaagaactcacttttataacaacccaccctcaaaataacaaacccacttccacaataacaacatcaatccatttatgagggtggggccttcttggcctaatcacctcttaatggtcccatccttatcacaacagcaattacatttcatcatgagttttgaaggggacattcaagctatagcagggtgggagctgaaatctgggcttcatccccctcccagagtttttgtttttgtttctggttttttttggttgttttttttctcttttccttttttcaaaaattggttaaatatatcatatttaacatatttcttttttaaatttttatgtgttaaattttaaaattactaaagttatgaatgattgttataacaagtgatcacaattgagagtggtaatcaaaattatgaatcttctgcccttgaagtaaatagtttaacaacctggtagggatcttttcacatccttccacatgcaatgctataaaaacatttacaaaactatacagggtttagttttaatttcccattttaataacaaaaatattattgcgttatttacattgtcttcaacttggctttttaaatttagtattctatcatggacttcctctagatcagttattgtggcttcaactcattcttttagggacgttctttaaatacatagagccagtgtcacttagttgacatagctctcctgctattggtggacatttgaaatagttcttttttttttcctgttgcaatatagcctgatttgctatggtatgtttgcttatgtagagcacagtcctaaaagtgggctgctttggaaacactgccccccaacactctggtgattcacattttcaccagcaataggtgggattctctgtctccacccctcagccagcaagcagtaggcatcctggagcctattaattttcatcagtgtgaggcaaaaataatttctgcttattttaatttccatgttatattagtaataatactggatatcttttcatatgttcatgaactatttgcattccctttatgtgaactgcctgttaatgtttgttgattattttttctaaaggattgtttgtctttttttctcactttggagggtttttttttttttgaacattagagatttttaagactttatcataaatgttgccaatatttttcccaatccattatttttctttttttgttatcttttgtgatagcaaaggtaaaataatacataattcaatatgttcatcttctcctttctggtatgtggttatacaagaaggccactttccctctaattttatttcagtattctcctggagttccttgtaatgttttcattcatttagtttttacattttaagctttaacctttctggtatttatttgtgtgtattgtatgagggaagtggcagagggtggaggtggctagcttttatctcttccagatagccagctactctagcacagtttttaaaatgaagttttctttctcatctgaattgagatgtcaccattggcattttccccagtacctatatctgtatacattttgggattctcagtactggttcactggcctattaatctgtttctggcaaatgtcatattgtttcgattataggcactgcatttaagttttacaatctgttaatgcaagttttctgttcattagtttttttcaaagatatcttgactggactattatcggacatttgttcttctattttgctcatttcccacagtgactctatttgtgtagcttttatgttctttaatgagatttttttcttttcttcctaaaactcctggacctgtcttgtctgttagtgacttttatattgtttttgctaccattttaatgaactatctatatatttatataactcttttccatttctattccaacctgatgttactggtatggagaaaagttattttgtttatttctgttttatccagttcctttcccatcttctcttattcactctaatgtagtttttactagaattcctcaatacttttggatatatgatcacatattctacaaattcaaaacaagtttatctcttttttctaatatttatacaacttattattccatgtcttattgtgtatctttagaaatctcaaaaactgaataatcatgactctagcagttatatctatcttgttcctgattttaaatgtcttggtgtcaccaatttataagcatttgctctggacagttagcaaataggttcttgttatatttaggtagtttccatgtattcatttttgctttgagtttttattaggaaacattactgaactttttcaaatccctttttgcagcaattagtgtattcatatagcttttctactttattgatttaataaatgattttgatagatgttgactcaaccttgaactcctattataaatgctcattgtctttttttaactgctggatttgatctattgatattttatttacagtttctgcatctgtgtttataggtgaattgatctataattttctatttttaatgtttctatgtggttttatataagatgatgctagctttacaaaataacatggggaactttccatcttattattatctggagaagtctcacaggaattatttattgttaatggttaattagataaagcagatctttattttctgattccttttgaagtcatttgtcaattcacattgtctgctttcccttatatgcaagtcaggaaattatattttggtagaaaattatccatttcctttaggtttttgaatttgccatcataatgttgcattgacatttttctcattcttttcttctatatctatacttatattactcttttcatttatgctgttgaacagttttactttttctctttcaaacttaatcaaattagccagagatttatgttaaaatacaaggaactgtcaaggaacttgatagattttttaaaattacttgttttgtttgttatttcattaattttcacttctgtctgtattaaaaccctcttcatatggttgtttttggggttttgttttgttttgtttctgttcttgttttttgagatggagtttcactcttgtcacccaggctggagtgcaatggcgtggtctcagctcactgtaacctccacctcccgggtccaagcaattcccctgcctcagcctcccaagtagcagggattacaggtgtgcaacaccacaccaagctgatttttgtatttttagtagagatgggatttcaccatgttggtcaggctagtcttgacctcaggtgatccacccgcctcggcctcccaaagtggtgggattacaggcatgagccaccgtgcccggcccatatgttcttttttgagagttttgttgatggtgttgaggttaaagcaaggccttggcatgagacttcctggttcttatctggactccaggcttcagtactgcagggccttcgtctgtgtcttggtttaatgggaaaagcaataaaatacctgtctcagagggatgcttgacaaataagtgtagtaatatttgtgacatcctaatagcaaagcctggcacgtagcaaacgcctaatagatgttacctgtttcttgagttgaatatttatttcttcctcctttttctctaattttagcttgttgattacagtatttgagccctttatgtgctgcctgtttgtgctagctttctttatcagagcctgaaatatagatatagagatatatagatatatagagatgtacaagtgtacatacatccatcgatacaagtacatatatttatttcccacttctgatgatttttaaaatctcattcttcttatgtctctacaaggttttgcttgacatacctggtttctggctttatgactcatcaatacctattttggttatatcaaatggccaccttaatcctgttgatgtctctgtccttgaaattgagtttgttttctcttcacgtgtccactttgccctgtttttctttgtgtcaaccttggataagttttcccagatatttattttcaggtttttatttgtctctttgccgtaggtatatttcttgtaaacagcatttggtttttaatctcatctgagtgtgtttcttttgaacgagggatccacccacttcatatttgtgtacaacctgtcctattagtatatatttttccatctctttaatttatatttattactatttcctttttacccttcccttattcctgctggtttcctagtttctaaagaatactgatattctactttctgtatatttctacctatctgttccttggttggttttctcagttataaaacagggataacaatgcccttcacagggcagctgtgcacttagcacaggccctggcacataataagtgctcaataaatattagttatattgctattagccgcacatcaccaaaagaaatgatgatcatctaacccttacatctatgtagtgcttgttacttttccaagcactttcttaactaatttggtccttataacacctcggtaagaactgcagggaatagcatctgttttacatatgaaattattggggtataaagacattacgttatttgtccaaggatgacaaatactaaacagtattgatgcttagactcccgaacacagttcctgaactgtaccgcctaggtttcacatagacgaatgattctctgcacatcataatccctgggaactttttaaaatcctgatgctcagaccacatcttacactgattaaatctgaatctgtagcgtgagacccggcatgaggagttttagaaattctccaggtgattccaatgtgcacccaaggtcaagagccagtggctccgattttcttggtgtaagggtaaaagcagaaacagctgttatcttctacctgtgatcttttctgtgaggcaactcttcttacacatgccaaggttggcatagagcatggaggaagcgattactgcattttgtgaatgaaaagacaaggaaaaggcaatggtgcttttcctctaactggctctgttgcgtggaatcagaagaggaaatgaaatttcagcgcaacctgagtctcaagggctccttgagcttccccaaagcaggtggtatttttagcattcaagtgaatttcagaggcaagtaccttggagtgggtgtgcctggctgccccgtcatctctaacctgcaacagcacattccttcggtgctgctggcagaagagaacagagaggggtccgggcagagggttccggcagtcaggaaggatgactcaggagccagaggtaagtgctcctaccttcccaggtatccagtgggattaaagtgacagtttgggttggttcagaatattacacaagggtaggtattaaaagggtgcttcactgacatgacacatggtctgaaaaggcctttggcactgctggcactcatggctgtgaccttgttgaagtaacggtcccttcagggcacgtgtgacggaggttgttgctccagccctggtacaacaagcagtcacgggccacgcgatgatgtcttagggagatcatgcatgtgccatcgtgttttttgtgtggttgagctctgcctgacacaccagctggtcagtattttttaatgtaattgctgcgtgtgtggaagccacagccgacccaggtacagcagcccctctgcatgtttctgggccaagcatagcccgaatccacctctgcccgcaaagggagaaaatacagagaaacccacatttgttttccattggcagtggctggctgcttgggttttgctggtgtttggatgaagaaggttccagaggccacactgtatggtctggactgctgggacacactctctaagaaacaaaagtgaagtaaagtcagacctggccatgctgtttgcctggctgggcagtgctcctcttaaagctgctaaagttttgcctgaacatctaatgagacggcccgcgttcgtggtgaacatcgggtcaatgtttagctgcgttgccatgagaaatagcttaatgctttgatgttgtcacacccagaaaggaacaagaaaactcagaaatgccaggaaaagcctaatcagatcccagaataaccacgatgttcgctcctgttcagcagttagagggccaggctgagggctcactggggctgttttaagtgtggaagtagagcagacctgaaattaactttcaaacaacccaatggggaaattattaatttccttttaaaagtctctaatgatttcaaatctggcagctaacctaaagagagagggacatctattattactgtttggatcagttccggcatatgtagctttcaagttcctggtgccccacccttcatgtctgtgtgtcagtgccctgagcgcaagcagcccagctgcacatcctcagggttaaggcaggcgttttactggggccatgcaagctgctgctggaggcagctgagccagggctgcgtgctcatgagagtgcctgatggctgggggctggtggcctttcctgagggacacctgaggcctctggggaacaaccctgtcttagataggacctcacatttggtgcagagggtgtcactccagagtttcgtgcattgcagagcacttccgcacacatcaccaccgccctggcgccacataccctcttctcagcaggcggtgctgctgtaggagccaacgtgggcactggcattcccagaattcagcctggcccagcaaggcccccatggtgacagccagggctggggcatggaccctgactcctcttggcctggcctgttccacagtcgctcgtgtgaacagaagaggaggcccttttcctaccctctgagggtcatgaagtaaaccctggactgttcccagcatccttccaccagttccactattcttgtgtcctggtgagcagttcagtccattgtcccacacatgcccattttctccaggttccaaatactgaagctttccctgtcctcttcctctgcccatatgttttccctgtggaataggagacaaatgtgatgctatccatgtgcatgttagtgcttcatagaactcgaaaatgggtagccagggtcacgtggcagaataagtgaaggggaacagcgcgtggcttctcagtcctgtgttcatgtcgtcctgctggattttaagacatccgacaaagcagtgagcatgtcagtcacttgtatttagttaacgacagagaaaaatgattaagctagacaggcagaaacagaaaaactattatttgaacttcagtgacaaactagaagacgtaatgagaaaagaataagaaagagaataagagtaagaaacattagccaaggctgtgagaactgttggagttcagcacagagatttagattcattatgatacaaatggattctagacaagttagcgttaagctttgaaaactcatcagaatatgcatatctatagatatgattattaatataatcatatctatagatcttatatctatagagacatatatatatttaaaagcatgtttatcccagttataagagggagatgactgcctttcaatttctaaacatatatgaagatatatgatcagaaataacatgaacattaaagcaaaattatttatactaaaacataattttaaaaagaaaagacatggaaaatatttcggaaaaaataactgacaaacacttaaatccaaggtagatcattggtgcaactccatgtcagctgatgatcgaatttaatttagccaaagtttatcgatctcctgccagatgcttgggacccagcagtgatggccagacctttgccctggctgtcacagtgctcacagattccagcaagtaaaaatttgagagaatgaacagttaatttacatataagaaaacactggcagtaaatcatggcatggaaacatacacaacatcactggcaattacagaaattcaaattcaaacagcttgcaagtactgtcacacacctattaaactagcaaaaataaatatacacaatgagtaagacatttggcagagcacagagcaacggacacaccagggtcttgctgctggcactgtgaattggttccatatgtgtggaaagtaattggcatcatgtggcaaaagctataaacctcttttctcccagtgaactgttctgaattcaatatttcctttctgaagaatacctctaggacagaattcaaatgaaatcaatagtgatggccacaaacatggccacagcactgctgtttatgataagaagacatgggggaaagaaaccaacatgtctgctgggtgcggtggctcacgcctataatcccagcacattgggaggccaaggtggtggatcatctgaggttaggagttcgagaccagcctggccaacatggtgaaacccccccgtctctactaaaaatacaaacatgagttgggtgtggtggtgcatgcctataatcccagctactgtggggctgagacaggagaatcgcttgaaactgggaggcaaggttgcagtgagccgagatagtgccattgcacttcagcctggacgacagaacaagactctgtctcaaaaaaaaaaaaaaaaagaaaggaagccaaaatatctggtggcagggaaagactataccatccatgctgtaccagcaagcagaccacgcctagccaggaaaaagcgagcctgcctcctcagcactcagcactcagcacactgctcctcctcgacccaggacaccctgcagatccccacacaatatcctcaggaaagccttccttaaccctcaggcctggtcacttgcccccaccccaaccttctatgtctcagagctccctgtcagttttattcaaagcactaaacaaagtttgggttatttgtttgggtgacattcttctttaatcaatttctccacatgactagaagcttcctcaaagcagaaaccttggccaattttgctcaccctgtgtttgcccctccgtataggacttggaacacgatagataggtgggtaggtagaaaatggatgggtgggtgggtgggtgtgtggatggatggatagatggatagttgcttggatagatagatgggtcagtggatggttgcatggatggataggaggatgatagatggatgaatggatagaaggatggatagatagatgggtgggtagacaggtgggttgatggttacatggttgcatggatggatggatgaatggatggatagatagatgggtgggtagatgggtgggtggatgattgcatggttgcatggatgaacaggtgggtgggtggatagatggatggatgaatgaatgggtggatggttgaaatttttgtatgcagtaacctcctttctgtttacgtagggcctcatagctttaaaaaagtactttgccaaacattgtattttaatctcttatacagcctgtgaggtggaagttttgtctttatttacaagttgagaaaactgagggttctctcgaaagcaagttaagtagcttagttaactgcagacaccatatttttatttcttgcatttttttccctctttcaaatagctattggcaaaattcctaagctggaactagtgacaggagatttcttgtaagtttcctatttttaaaagaaatgactgaaatattacagaaaaaagtacaatgttgctttttgttttaaaaacctctctacctgttttttaagaattttagcaaagaaaaagtgatgaattttactaaacacatcttttggcattcacttgcttaaaagagaagctcagtttccctttctctgatagggtgtgctgtgctcctccctaaattactgtcacgcccttgtctttgttcagaccctacctggccagagaacttaactctctgagtttagttgtagctgattaaatattttgttgcagttttgtatccatgtgcgtacatgtaattgggctggaattttaatggcccttgcaaagtaactggttttgactcataaaatgaaatgagtcctgtattaaggaaccacttacataacataggaactatttgttatttgaaatatttgactgggaaaaaattatattgaattaggagacttggggagctgattctctattttccttgtttgtttcatacaatgtttgttttttctctgatcgtgtcactgatgatttttattttggtaagtaaatctgacatttctacttccagattgtttgcctagagtctggacttgtagccacagattgttacaacgactgtttagtacagattgttacatgttgactgtttaatatatgatcagaagtgtatcttgtaagttatttttgtacttaggtttctcatttatctggtttcaacggtaatatttcctttctttgtttaaacatattggcagccaaccactaattctgatatttacaatattttttaacagacatgctattgtcaaaactgacttcattgttttatctcattcagtcttttatttaagtgggtaaacccctctaagattagaaggaaactgtcccccattttcttgtctctcctttccctactccctgtggtggttattctcaagtcctttctgaaattctccatttacatcatagagtcctcacaggctttccccaaatttaatagctgatttttctgtcattgtcattaccttttaaaattacatttctaatctacttagcaggaatgcttttggctttctaagagtctgttccttgcctttccttttgttatctgtgtgatcatgaccataatctgtgtcaatggaatgttcccagctctctggtcccaacctcccctctcttcccttgactcattaccatctgaattcttagaactgctgtaacaaagcacccaaaactgggtggcttaacacaacagaaatgtattctctcacggtcctggaggtcagcagtccacggtcaaggtgttggaagggtcggcttctcctggaagccctgagggagggtctttccctgccccttccagctgctggggactgctggtggtccccaacacttctcggcttgtggccacatctcccccgtcatctgctgtcttctccctgtgtcttcacatcgtcttcccgttgtctgcctctgttcacgtttctcctttttcataagaacaccagtcatgttggatgatggcccccacaataacctcattttggctagatgacctctgtttttaattaaagtcacattccgcagtacggggcgttaggacttcagcatatctttttggagggacacactgcaacccgtcacaccatccttgctgccttcacttcattgcccttggcctggatccacctgccatgggccaccttagatgccaggtagacggccagtcaaggtacagtgtcctcatcctcccgttttcaatgcctcctttctccttaagagcttgtctctaccagagtgcaggaacttgagaagtaggtgtttagaaaacccacaatgaatattcctcctgggagcagagatgaggcacagtttgtttggttctgttgtggcctttacatgcacaaggatgctgggacagagctgctgtctgtggtgtttccagttctctgtcactgaatccctgtcactcagggccccgtctgatggtctgagttcccagagttctctgggaacctgtagccttgaaatttaccttcagcttgtgggcgtcggtgcacagacgctctctgcagccatcgtctcatctctactataatcactggcgtcatgcagataacctgggatgagccttcagatgccatttctgggcctgctgctctgagcatctttgttttcagggcttcttttggcattttctccaggcctttgagtgagtctccccattttagattaggttcattgattttgcagcttctttggctgttcagttgttcttattgttacttctgcgtatcagaatgtggctcttgtcttactggctggttcaacaaggaggaggcaccgtcccaggaatctttgcttaactgcagaaagaaagacttggggtttgtatgggccaagaattgacaagttcaagaactttctgtgtatttccccccattgtaacgtgtgtcttcattgaatagatacctattaactgcttttactgtggtgtgcccttttgtcactgagctatagtctgtgctctgaagggatctacggtttctaggggggaagattcttactcatgagccataagcaaaatactgaccaactgacaggaacaaggagctgcagacacaggaagagctatgaattctgctgtggggtcagtgagacctagcaaggagctaacattacaacgtcactccggcaaggctgctcttgaccccacagaatcgtacagaggaacacctgtgtgcatatgtcacaggggccaggaatcgttttcggagtctgccctgggctggggtgccagccacatctgctgaggttcaaaccaggctaaaagctttgtagatgccagctcttcattgaacaatttttttcttcaactaataggtttgcactgatataaaaacataagagatgtcattgtggggcaatgcctcattcactgtgacaattttatggctaacatctccaagaagcatcatgtgaaggtgtctagcaccctcctgaacagcagcctccatcaccagatgaggagatctttcttatacatcagtctctaatgaagcagttgcccttaaatacacctaatccttcttgaaagcaatccaagtcaccaccactgccgtggaaaacaagtttctgaaatcattgcactgagccttctcgagaaagtggtacttccttttacttggactgaaatttaaagggctcatgcttgaaaaaccaacatgaacacattctccacctgtttgtgatagggtgggtggagcttaaccactcctgtgttgaattgatggcttctccttaaccagctgtctttgattttgtagtttagccttcatggataggattatataattgctggctttgctctctcggaatcttgtttattgtgattctgcctggactagacacaaataaataatgagggctaatgagggcttcagggctggaagagttaggttttaatgtcaagtgcatgaacatctttttatttatttattttttattttgagatggaatctggctctgtcacccaggttggagtgcaggggtgcaatctcagctcactgcaacttccatctcccgggttcaagtgattcggcctcagcctcccaagtagctgggactacaggtgtgcaccaccacacctggttattttttcatatttttagtagagacagggtttcaccatgttgtccaggctgatcgtgagctcctggcttcaagtgatccacctgccttggcctcccaaagttctgggattacaggcatgagccactgcgcccagccctggacaacttttttaactgtgcattttttctagtttctctctgccactttgtggacacctgggcaccctgtaatgtctgtgcttgaacaagaaaataacttttgtaaatcagttttcagactagccccagaccaggtagaaattgcacaggtttttcaacctccatccagcccagaaaccatttccaagcatgtctattttccgagtgtcaacatttttgcagacttctgctttttaccacttccctcccagcttgagtttatcagatgtcagtcctgcagaagcacagtgggtatgtgcctacagagagctctgggaacaggcaacatctgctttctccaagaggagaaaggaggtccactctaagggtgtatgcaaagaccctctgtattattctctttttacactgctgataaaaacatacttgagactgggtaatttataaagaaaaagaggtttaatggactcacagttccacatggctggggaggcctcacaatcatggcagaaggtgaaagacacgtcttacatggcagcaggcaagagagagaatgagagacaagtgaaaggggcttccccttataaaaccatcagatctcatgagacttgttcactatcatgagaacagtatgggggaaaccgccccatgatttaattatcttccaccaggtgcctcccacaacacataggaattatgggagctacccgtaattctctatctccttcaggatgagatttgggtggggacacagccaaaccatatcaccctcttagctccaggcccagcccaccttgtacttcccatgttgtcctcccatcttggcccctttggtcaccatggtaacccacattccagtagggaggcgggggaggtctgcagccccagagcaccccagcagccctttgagcacatgggccagtcagttaccaacagcacggctacacccttgtggtccccaaaacccttcctacaaatgtcaatgttgggcctacttgtgagccctgcagttgatttatgaacaagcagtttctgcactttgattggcagcttttccttggcctcgaattcccctgccctgggagtgtgccccttcccctaatttcttttacccagaataaattaaccccacaaatcactgccagtaggaaggcaaagggcatcgctatagatcagaggctgctctgggtgggcagggagaagctatgaaagaggcaggaagacataaagttggaaaagtgggttggagccaactggggggctgtcaggctgcaaaggagggactttggatgttctgctaaaggcggagtgggctagggagagctgaaaggtcttgcgcagactttgatatttcaggatgattgatctggtaagaagtgcacagagtggatagcttgcaggtcttggtggcttgaatctcttcagctcacaaacactgatttagtgtctgctgcatagtgggtatgaggttgagctgcagaggcagccaggcagggctctgcactgtggggtgtgcagtccgggttccggttggccatgctgtctgccacagcaaaagaaatgtgggctgagtcagtgccacacagatcagtggagaggttaatacaaagtgtctcaagctgaacagagcccaaaaaagtgctcacctccactgcggcttgcccagagtccacgtggagttagttaagcagcctgaggctgagcccctgctccttctgcagttcagggctccagccccagctcaggggatgtggaggaggtgctgagagggaggctgccattgtaaggacagccacacctaagcccttccccaaggtatttgtaccataattgggtcatgttacagtaataatttgattacttgctgttgttttgtttattttatgatggtccccagagttttatttaaagattttcaatagagacttaagatttgttgtcaaagccaaaaccataaccagcctcccctgcatcttgcatttggctgccatttcagtttgggtaccaaccattccatacggaaagaccataatggccacgcagagtgagtggagagggttggattgcaatctggacaccttgattccatgttcagctgtctggcccttgcccctgagacctgggtgtgtctctgtgaatccaggaaggagaggcagacaggccctgtggagccttttttgacttggcattgcaaagtccacatggtgaccttcctgtcagcctgttgctgggctgactgtcatgcttatccaaagactcctacccaaaggccactgtactttgcaagacgaccaccggaaacaatattgggacgagaactgacctaggcatcatctgatccaagccacttatttaacagattaaaaacaatgataatggaatgaagagtgatacagtcgtgaattgtggattatggaaagatgagggaaaaaaacccctttgctgcattgaattggaggcatcagaacacactcatgttaaatacagagctgtgtcccatcaatgggctgaaaagcagtgacaccccagcggtgatgagcacacctcacacccagatcttggtttctaaataccaatttttgctcaagggaatcaaggcctgggcttagaaagtacaagaggagactggaagatcttgttttgccgggaagtaaggaggcgtcccaaaattgacagcgatatgtcacaggaacacagggggctctctcccaccccagtggggctccccctggacaaattggggatgacttgggtgtcaaaaaaataatgatacttgggaaaaaaaagaatccatgagtccatagtgatacttaaacaggtgaggaggcaatgcttttctatacagaagaatgccaggtaatacatgtagaaagaaaggtagctttagcaaaactttctcattgcaaccaccgttgtactaattgattcaggccaggatcagcaacggaggctaaacccatggggcaaaaggatgcagaaacacagaattgtcacatagtctcagaatatcaccccatagattgtgtactaatcgcaaagggtataatgttaacctttacaaaggagggactgatagacaccaccttaaccatgagaccaaacagggcaccacctgtagcaggaacacctaatatcaggtgccccgggtggggtttagtgggaaccactcaactagactctaaggttgttgcccaaaatagctaactttaatctaaactttaggaaaaacttgagtaaattcagattatgggatattctataagacaagcagtgaaacacaccagcatctgcccccgatgaagaggctaaaagttgcaggacttaatgcaacgacaatgtgataaaaaaaaaaaaaaaaaaaagaaaaggcattaaaaggtgtgaagactcttccagatgaaagaaaagtaaagaaacatacagtgtaatgcagtgtgtgattgcaatgtcatgcaattgtcaagggatcccagatcaggacacaaaatagttataaaccacatttctgggataattgagaatattctaacatgggctgtgaacttaataatatcgtattgatgttacacttactgaaaatgataattatacggctgttgtgtagaaaaatattattcttcagggatacatgctgaagtatttacgggtgaagcatcacgatgtataatttactggcaaatgattcatcaaaacataaaaagcgtgtgtatttgtgtggagaaagaggggcaaaagcctatgtgacagcgttttaacaatcagtgagtcgaggtggagagtgcacaggtattcactgtgtcctagtgcaacttttctgaaatttaaaaaatttttcaaaattaaaatgtggggagtaaaatagtaacaatcaaacaggcccagggcaattgagtgacttgtcttaaaaaatcagctcagaatctaccctcctggcctaagatccagtgccgcccttcccttttcatccatgtgaacagagagacagacagacagagcgacagagtccctcattcctctggttcaaagaccggacggagtgttgaggggcgtaggcccagtctttccaaactcctggagtgggcggaggaggagctaaagacaggcgctcatcgccatctggtggccaaatagggatgcccgtcacctgccgccaatttttgaggaattcatcccacgttattgggacctttctcgtagcctctgcttgttacattttcccatttgcgaagcactaatttttgttcatatttctgctcctctaattttccaatacggatttccagttgcttcgaagaaacagacccaaaagcagatttcttctccccagaaacctgattgagcccaatattcttcggtaatcaggaagaaagagcaaagtcctgctcccatatatttcgccaggtccctttgaccaccccatgccggaaaaccgctggcccttctgactccctctggtggaaataaaggaagaccagtgagaaatgagtggagcaaagacattttgtttagcaggacttcaacggcaagagcgccagccaccaggacttgcgtgtggcagagacccacaggctggcagaggagcgggagctttctagtgggacaaagggaaggcctccggggcctcctgccgggaggccgttgtcgtggggaagctggggggcctcgctgcaggctgggcatcctatgggattggtaggggtgcaaagttggctctctcgggttggtcctaaatggaaagtgaggacaaaaattagagaatcggtcagttattaaccaagtcctggccattttagactgacttttacggaaatgatggcttagcttcctgggttgttactagagataagaagtggctcatgcctgtaattgcagcactttgggaggccaaggtgggtggattgcccgaggtcaggagtttgagaccagcctgagctcgacgaacatggtgaaacaccgtctctaataaaaacacaaaaattagccgtgagtggtggtgcagctactgaggaggctgaggcaggagaatcgcttgaacccgggaagcggcggttgcagtgagccgagatcgcaccactgcactccagcctgggcgacagagcgagactccatctcaaaaaaaaaaaaaaaaaaaaaaaaaaaaaaaaaagaggctggcctcctgcaagagactggcttcccgggctgtttgctatagataaagaggttggtttcctaggcaggtcactgtgggtcgtgggccagagttctgttttttatatattgtgtggccatcgtctgtctgtatctcaggctcgctctgaaagcagcctgtccaccaagcaccctggcgcggtgcgggcagctgcaggcggcagctcctctgatcacaggaaaggccgccttgaagggaggtcagagacttgggtttgggagtcagctttcttctccagtctgggggaggcgcctggacgcttcagcggtctcctctgtacgtggacaatcccgccgcgctcttccctgtgagccgcctcttgaggggcggcactgagcccgcgcccaccggcgccctctggaggttggagggtgacttgcaggcgctgtgcacagattgcctgtgagacgcaggtgccgatgggaacaggtagctcttctgcacccaccaccgtggcaggtgccggcggccgagaaggacatgtgcaggcctcttgggacccgggctggagcaggcacacagacgcgcatttgcattaacccttgctttattccaagcccatgtgggccctgaactcaccctccacatgtgcttttcctttctttccaccaccaggctctccgtgtgaaatggtcccatctcagactgccctgggtagacctagactggctcatagacatctcctgccagatcacggagctcgacctttctgccaactgcctggcgaccctcccctcggttatcccctggggcctcatcaatctccggaagctgaacctctccgacaaccacctgggggagctgcctggcgtgcagtcatcggacgaaatcatctgttccaggtggctccccggggtgtgaccggagccgtgtgtgaccccgctgtcaccgttgtgctcctgcacatgctcccgggttgtattttgtggttttgggggaaaaatgttctggctaaaataggagaaggagttttgcctaccctgaggcaagcctccctttcaggttaaaacagagaggtttagagagatcatttgtctggcccaagtttacacagctcacccggggacatgcgaatgcttgcctgagatgcttgtcttggtcctgcccaggaatcagatgagggcagccaaaccttcccacactggtggatgcaatggggctctgaggcaccagcttttactctgccttccagggaaagtgggaagggcctcagagaaagggttaactctgcaggactctggcagcaggtggacagtgtgggcagtccaggcttgcttcttctggaggccttggagggagacctgagccttacccctgagcttgcatggaaggaggaatgaccttagttgatttctttattttttatttttatttttattttttttgagacggagtctcactctgctgcccaactggagtgcagtggcataatctcggctcatggcaacctgcaactccctggttcaagcaattctcctgtctcagcctcccgagtaactgggattacaggcacatgccaccacacccagctaatttttgtatttttagtagagacggggtttcaccgtgttggccaggatggtcttgacctcctgacctcatgatccgcctgcctcggcctcccaaagtgctgagattacaggcatgagccaccgcacctggcctgatttcttttggacacataactgcaagtcctcattccataaagggttgaatcgatttttaaaatgaaaaaccaaggctctaagtgaagcaagagtcaagaatgttggaaagagcttggggtaggcattaatccatgggactcccaagtgagaacgggaaagaagcctgcacaccagaacttaaaaagcaagtgccgtccaagtgaggcccttcacctgggccagatggacaggtccagaaggttcaaagccctgctctgtggtctcagcagctttcagggaacctactcattttgctattacatgcctgcgaaggattcgaatccctgttggtcagtggagccagggcccaccgatgagaggtttgtctttatctacacaggacacagtaagagttcttcaaaagaattaaaaatcatatgcactacattttcaatgcacactctttaaccttgcatggggagaaaaagaaaaaaaatacacctcttggtttatagaaaaatatgtaaatttggtgttttccctctttattctgatgcctgccttccttcttctccatcgcaggctacttgaaattgacatttccagcaacaagttgtcccacctccctcctggattcttgcacctctcaaaacttcaaaaactgacagcttcaaaaaattgtttagaaaaattgttcgaagaagaaaatggtatgttttctcatcaacttgagtgaattagtcattttcttcttggtagggatatttttaccaattcatactttgggtctttttttttttttttagccactaactggataggtttacggaagctacaggaacttgatatatctgacaataaattgacagaactccctgccctgttccttcactctttcaagtccctcaattctctgaatgtctccagaaacaacctgaaggtgtttccagatccctgggcctgccctttggtgagtatcacaccaaaagtcatgaaagccacagtcaactctgcctctcagctggcctcagagagccctcaggtgcattatgtcagttcatcccctcagcagcgaagccgggtagaagggcccggttcccacattgtaagcatcgtcactcagcatacagcgaggctgtgtcccaggcagatgactcacctgaaagccagcctgcctggctctgggttcaagagccacccagcaacacccacagaactttacccagggacagctttcaccctggcacaggacgactcatgcctgaaaaaaggagggttcagttcttttaggacaactatcacataagagtaagaaatcaggccgggcgctatggctcatgcctgtaatcccagcactttgggaggccaaggtaggtggatcacaaggtcaggagattgagaccatcctggccaacatggtgaaaccccgtctctactaaaattaaaaaaaaaaaaaaaataagctgggcgtggtggcacgtggctgtagtcccagctacgcaggaggctgaggccagggaattgcttttaccggggaggcagaggttgcagtgagccgagattgcaccattgcactccagtctggtgacagagcaagactctgtctcaaaaaaaaaaaaaaaaaagcatcaatctgcactcgtagcactgctgattaaatgctgtttttgcatctggggaattttgcttgttaaaacagatggaatagcatgaagaatgtgtgtgtgtgtgtgtgcatgtgtgtgtgtgttatggctgttggttttaaaccaggaaactcttcatcactggcattatcattcctagtttggccattcgtgtaggggaaaccagcttctctctccagtgtggtcctgaattgttccattatttccaaggacaatgggccggatgttctggaatgaaggaaaaagaccatgagctcccccaggaaaccccattcctgtcccttccttggagtaggggcgggaggacaaggacagtgagggtgtgcagccttccagcaacactcagtcatcttcattacaggacattattgtaatggtccatttttaacatcaaatttggaaacagtctcaaaggcaccactgcatttaaagagctaactaatatacatttttttttctcgtcaatctcttagaaatgttgtaaagcttccagaaatgccctggaatgtctgccagacaaaatggctgtcttttggaaaaatcacctgaaggatgtggatttctcagaaaacgcactcaaagaagttcccctgggacttttccagcttgatgtaagcctaatagccctttctttctcattttcggcttttgagagaaaattgctccgtgttgcagtgaaatgtatgtgcttttcctgagcttctgagataaatataaggggaaaagatgaagaaaaagttcagctatcaaaaatatgcatggccacgaacagcgatgagggtggcacgtggacagcagaagcagctgtgtcaggtggtggtggggttatggttcgtatccctcgggactttctttaagtccacggcctgcccatatatgaggctgagtggacactgagagctccaggaagggcctttccacggaaccctgtgtgcctaccccagaatacgggtaccttctcgctttaggttgttttaggtggttggcgggtccttaggcagacaggccgtggatcacactcattgcttggagctcagggccaaccccagaaggggccccatcagggcagcctcaccaggggccctgtagtggacccccaggcagagtgcccaggccaccctgcacaggcttcagcccccggtcctgccaggccactgccaggacccccacgggcactcctccaaggcctggtgcagcctcttgtgtgcggcgacccccacaaggcagcgaaggccccttcagcatgtgtatcctcagagaggatgggctatcatgtcctaggctcctgacaagcacagggcaaagccagggacccagggacaggactcacgcttctcagaagaaaggagccacgcggggtgcccccgggggggggtggtcccacatcatactcctcgcagggtactcctggccttcaggccttgtccacagcccctgggcccctgttctgagtctgtcttctcgtatttcacaccaacaactagcaggcttggatttttggcttcccccaaagcccagaagcagcaaatcaggagaggcagagccttgtccagagcttcactgtgggcctgcagggaatgtgtctgctcgaggtctccttctccacactgggaaggggtgggtgggtatgtgggggcttgggggaccctgaggtctggcacatggcagggtctccatagaatttcagcaggagggggctggctgcagcggttctgatggtgggcggtggcgtgagccccttcaacaaggaaggagacaaaagcaccaggaggagagaatttaatgtggggcagcaaacagcctgtggccctcctgaggccgccctggttgtgggcgggatagttggtggctgtggtgatgtcctcaagcagggagatagcatgtctaaggtactcctgcaaagtaaaacgtgggccaggcatgatggctcagacctgggcacggcgactcagaaccgtactcccagcactttgcgaggccaaaatggggggactgcttgaggccaggagtttgaggctgtagcaagctatgatcacaccgctgcactccagcctaagaaacagagcgagaccctatctctaaaaaagtaaataaataaaaagaataacaaaaaaagaataaaacgtgttacaggtgcaaggtagcccctcatcccccttggtgactgggttccctgcagggtctgtttgcagtagggctgagggagggctacccacgaggggcaccccagacatgctgataatcctgaggggcccagcttgggactgtgtcggctagcagagggcatgcggctaggacagttacccttggtggcactgccaccccgtccccagacctgggctggcccaggaggccacccaccaggaggtggcagacaccagcactgtactgcatgccccatgccacccccaccagccgtgagccgttgtcctccaaaccatcagagtctggcactttccccagagagacacaccggtaatcagtactcttaagaatccttaatgctgacagctgcttgggctcctttcactctagaataattgcctctcactgcctttgagggaggagctcctgtagatagatggccccgtcgcactgtttgatatcatttcgtgagtttgaagaggctgctgggccccacacagctgggatctgcgtgaaggaaaattggttggaatcgtttgactgcgcgtggttgggaactgactggctcttcagtctcccctcccttcttgtatctgatgctatcttagcttctctctccctccctctctctctcaggccctcatgttcttgaggttacaggggaaccagctggcggcacttccacctcaagagaagtggacctgcaggcagctcaaaaccctggatctctccagaaaccaacttggcaagtaagcaggggcctctcctccctggccagttccaaagcgtgtgtggggccacggtcgagcaggtcctctgaatggtggcatgtgagtctgcgagggctgctgagccgccagctgggggcttaacaacagaaatcactgcctcacagccctgggggctgaagtccgaggtgagggtgtgggcaggcctggttggtttctcctgaggcccctctccttagcttgcagatgccgtcttctccctgtgtcctgttgcggtcaggcctctgttcacgtctgtgacctaatctcctcttcttataaggacaccagtcggattggattagagtccatcctaatgacctcattttaacttagttacctccttaacagccctgtttccaaatacagtcacattctgaggaattggaggttagggcttcgacacaggaatgtggggggaaacagcccctaatggtgtcctctcatttttaatttttagtctgctggagaatcttgtctctcacttcagcccaatctgtaattctgttcaaaagtctctgctgatcactaactgaaatggacgtggaattgaataaaagcacccagccccaaagccttccaataggtggaaagccgggatgagcccagccagcctctggagaccagccgcccccgttatctgcagaaggccacttctgcagtatcacggtggaacttgcaccccaaggaggacctctgcggggaggggtgggggcagtgaaaaaggcagccgccactgcagcgtgcgcccctgccaggccctgaagagttgcacatgaattgctccctatctccgtggcttggcattataacatcacagccaaaagtaatgcttttgtcgtgctgtcctcaaattttgtctctttttcctccccccagaaatgaagatggactgaaaacgaagcgtattgcctttttcaccaccagaggtcgccagcgctccgggactgaggcaggtgtgtgtgggttgggagacggtgttcccagatgagacagccggggtagcctggttcctgctccaccaaagtggggatcgcccttatcttgggccttccccttcaatgccctgttgcaatgccacagatgtccaagttcaaatgaaaaccctgcatatgagctgcgcccattctttctgtcccacgtgtgacacgcaagtatcctcaagccccactctcctgcgtggaggccagtgatgccagcagctaatatgtgcagctgatctacacaccaggcagtgccctaggcaggttacatatgtgagagtttctcatcctcacaacgtgaggtatgggccacatttccccattttgcacgtggggagactgaggctcccagggtgtctgagcttggctgccacaccaaaataccaccgaccgagtgcttcagcagcagacacttattttctcacagttctggaagctggatatctgagaggagggtgccagcactgtcaggggcttgcgagggccttcttcctggcatccttctctctatgtcctgagatagtgaagagagagaggactctggtctttcttcctcttctttttttttttttttctttgagactgagtctcgctctgtcgcccaggctggagtgcagtggcgcgatcttggctccctgcaacctccgcctcccaggttcaagctattctccttcttcagcctcccaagtagctgggattacaggcatgtgccaccatgcctggctaatttttgtatttttggagatgagccactgtgcccggcccctcttcctataagaacgttaatctcataagggccccaccctcatgacctcatccaaacctaattacagctcaaatatcccatctccaaatagtaattttgtattttaatacaatacaggatgccaggaagaaggcccttgctagcccctgacagtgctggcgccctcctctcagatatccagggtttcaccatgttggccaggctggtcttgaactcctgacctcaagtgatccgcctgcctcagcctcccaaagtgctgggattacaggtgtgagccaccacgcccggcccctcttcttataagaatgttaatctcatcataagggccccaccctcatgacctcatctaaacctaattacagctcaaatatcccatctccaaatggtgtcacattgggtattagagcttcgacatatgaatttggtggggggcgggggacacagttcaatccatggcatagggactgactgatttgtcccaggttgtgtggctgcttctcagtagcagagccaggtttcatcccaggactgtgggacttcagccctggaccagcagctacgtgctgttaagtctctactgccacacgatggtatcttgcaaagcccacatggatcacggccgcctttggacccacaggctgaggtgaggccaaggttgcacaggggctcgtggtcttccccaaaactcaacagagacagaactttcctagtttttgtgctggtcacacaacaaggccagttcagcagagagtacatctaggtaaacaagctctttttgttccattatcttctgtgagacacaggggaaggtatggagctgtccctttcattaaacaaccagctctgcttcttaacctcaaagctacaacttccaaagccagctctgctcacagaaatatccctcaggatgctggcccagaaaaccagaacccacatccaggttgttttaaacataatacaactttcttcttcagtttgatagatggttgttggcaagtacagatagtatgaggtagggatgagtgacgccacagaggccaggacacatttgcaggaggtgaactagggagtttgccgctgctacgctcttggatgaactggtgtgcttgtgtgttgagtatgatacacatagagatctgtcccataagagcgtgtgtatttatatgtgactgaaaaaggaatatcagtggaccagataaaagagtccaaaaatagacctcagtaaacatagaaatacatcgggagtccccagcgccccccaggaagcgaaccggtattggtccctggcctgctaggaaccaggccacacaggaggaggtgagcggtgggccagtgagcatcagcgccacctcctgtcagatcagcggcagcattggattctcataggagcgcgaaccctattgtgaaccgcgtctgtgagggctctaggttgtgccctccttatgagaatctaacgcctgatgatctgaggtggaacagtttcatccctaaactgtccccctcaccaatgctgcagtccatggaaaaattgtcttccacaaaaccggtccgtggtgccaaaaaggttggggactgttattatgtaatatatgacaaaggcagaacttcaacttagtgtaaaaggatgcttgcgtgcgttaataaacggtgttgatattcctgcctggaagggggacaaaacacgatactagattacaacaatcaggtttaagtataaaaaaagaaaacaataacatttaaggaatataggtataactttgctatgagggagatctttaaaatctagttggaaaatccaggaataattttttaaaaagactgaaatcattggcttcataaacattcaaaaattgtgttcagtgggaagcatcataaaccaagtcataatgcaaacagactaagaagaaatatttgcaacacaaattgttgcaacacaaattggcttaagtccctgatatacaaagaatgcttacaaattgatttaaaaaaaaaaaaaaaaaagacaacacaataggcaaaaaaaatgggcaagggatataaacaattttcagaaaaggaagtccagagggccaggaaacaaatgaaaaggtccttaaccacacgaatagggaaatgcaattatgaatttcataactgatccttttataaatgaagagccttaggactgtagaaattgagtccagacatagggatttcacttagaaggaaggggaaacaaacaccatcttctccttcatgccaggcgggatgatgggtatgagaacaggagctagtgtagacctcggtcacgcaagccacttgctgtgtggattagaaacgtgtctccagtttagaaatgccgaatccttcctgggaccacggaggagtgtgcaaggaagtgggctcagcactcaatgagacgccagtggggaaaatcacaggcatgcatggaaaagcaccataggactacgcgcggtaccaatgctctagaaagtgacagctggcagcccgcagaagtacatctggggagccatgtgagggggccgcgcccctgggaggttctctggcagaggtgaatcttggccttggcagatgacaaaggcctcttgattctttaaacttcatctagaaagttgaggcccacacctgagtgaaaagaaggcggctctttgcaaacccttttcctcagtagggttattctcccagggccatggacccttgggtaaggaattatctacaaaagacagcttgtttgcagtaggatagtaaaattccaagtagatttatgtacatccaaatagtcatatttgtgcagtggcctcatccaaaaataatttggatggccgtttttacggtaaaaatcagaccagcagagtcataaataacttatgaataaataattacagttcttaaataccttgaactgtgttctccccagctcagtgcccatcgttttcaacactgggccaggaggtctgttacaggtgttgcctctgtttgcaatcatagctcattattccagccatctcttacttaaagaggcttcataaacaccgtagcgaaactttaaaagtttggaaagcacagaggccaggtgtttagaatgtgttctctggggagaaagtaagcctttctcattatgacgttctttcatgaaaatgtgaattagggcaggctaatattgatcatcttttttcattgaaggaaaaaaaaggaagctttttgaacatttccttacctagcaaggactcatacaaagccatctttagaaggccggtgcacctttatttccgcaggagcccctgcagtgagtcccattcacagtacagctagctgggcagattttccaggcattggttttggtattccattatcggctctccctgaatgttctcagaggccaggttacccattaccattgttattgcagctacatgtgtggaggaaagccagagccgaggcggggtagctatgatcaagggcaaccgagcctggtttcagcccaacaaaagaactccggcttctctattttccatgtctggcagggaaccctatgagagggctttgaggcagttgtttaatcttgaattctccgagctcccaggcatgctgtcctgccccctctccaggccttagtagggaggataaaggcacttcagagattctgctgaaatccaaacctctgattcccatcagtgtgcgtttccaagctctttctcaactcaaatgctctggtgcccgtggaaacagcaaatttgacatgattttcatggtaatctcatagtgagcctaattaataaagtcacttaaatactaaacagttggctggcttttcaaagaatggcattgtaagaagcataaaaacagccaactgtggtatattttcattaactagctttttttcatggaaaaagcaacgcatgtatattttaaaacaccgtttttgaacagtagcaaagggcatgggataaatattcagtcctctagtaattcctttccccagagacaactatggagttcagtgcatctctggtaaccattgtgttcctgtctaacaactgtaacctctgtgcatacacatgtgcaggtgtggtgtgtgtgcatataacatatacatggtatgcgtgtgtgtgcatgcatgtgtgcacacattttctgctacactaataagccttctagatatccggttctgaactttttttttttttttttttttttgagatggagtcttgctctgtcacccaggctggagtgcagtggcacaaactcaactcactgcaacctccacctcccaggttcaagtaattctcctgcctcagcccccccgagtagctgggattacaggtgcccaccatcacgcctggctaatttttgtatctttagtagagacagggttttaccatcttagccagcctggtcttgaactcctgaccttgtgatccccctacctcggcctcccaaagtgctaggattacaggcgtgagccaccagcctggcgcaccttgccttttcaattgatgggtagctcttgagtattacttcatacccccatatatgtagacctgccccatactttgtaatagctgcaattattctattactcattgaaccaaccccctgtggctggacacataggttgttgtagattgtcctctatctctgccactgagtgtcctcattctcacatctttgccacacatgcatgcaaagctatctgtagaatgagaattgctaggtcgatgaggtgagcattttgttctgataggcttgccaaaatgccctctggaggttgcatcagtttatacgcccacctggtcaccacgctgtgacggtccagaattatttttaaatgcagtctgctttgccatgtctttgcagcaagtgtgctggaatttccggccttcctaagtgagtctttggaagtcctttgcctgaacgacaaccacctcgacacagtccctccctcggtttgcctactgaagagcttatcagagctctacttgggaaagtaagtacacatctggaggggccgtgctggctctgctggcccagagaggcagaacgcccatccctaaaccaactgggacacagaaagccaggcagaaagaagccatctactttccaagaagcagtagtgagattttcggaacagggcttgatcaaggaggtggggagagaggaagacggagtagcaatgcaatgatacacactttcactacatcacttgggctgtgatgaggagaaccactcaatcattcatcctttcattactgagctcccattgcatgccagctactgccaggggttctaggcagtgtgcaaagcttgatgagagtgtaaaatgttatattaatattaaagggacatcgccttctcgggaagaggtagtgatcatctttatggggatgtacttagtagcagagacaggaaagttgggggaggggactcaattctaagccgtggggatttgcagaagacagagctgccgtttctatcactgatcctccaggagaaagcctttggaattagtgttgaaatcagggctcaaagtgtggggtctggggtacaggctgcagaggctgacaggagccacgtgtgtgcgtgtgtgtgtgtgtgtgtgtgtgtgtgtgtgtgtgtgtattctctcgtggtggacacatctgtcttcagcaaccctggcctccgggagctccctcctgagctggggcagctgggcaacctctggcagctggacactgaagacctgaccatcagcaatgtgcctgcagaaatccaaaaagaaggtagggcttccgcagccctgtcccctgccatcacctcttggaaagacaactccagtccacttgttaagttctgggggtggagacagttggtgacccatggagcccagctccaggttccagatttgacaagatgctataaaattgtccctaaagcaatcgttactgagggtcactatactgagaaggaccaggtgatacaactgtgacctcctgggcagcaaggattttgtccataggttcttgcctcttagagttcgcttttagggtggttagtgtcatgccttccctccccctgatccagtagtcttccttaactgtccccactaaaacacaaagaaggagttccttcacaacaggattttgtgtcctaagagatgtgagcatgtgcccacgcagctacccttccccttaatgattttgcacaggccccaaagcaatgctgtcttacctgcgtgctcagctgcggaaagcggaaaagtgcaagctgatgaagatgatcatcgtgggtcccccgcgccagggcaagtccaccctcctggagatcttacagacggggagggccccccaggtggtgcatggagaggccaccatcaggaccaccaagtgggagctccagaggccggctggctcgagagccaaggtcaaggatggtctgcgtgcagagtccctgtgggtgggaggaacatcccttggactccttctcccttctccccagagagcccaggattttctcagcctggtgtccaaagctcaggccctttgcaggagccactgtgtaccattccataccagcttctgccaagagcagcgaatcatttcttaatgtgactttgtgatgttttctttttctttacttttcttttttttttttcttgagacagggtttcactgtgtctctcaggctggatgcatcctcaacctccccagcttaaatgatccacctgccctgtatgtttctgttatagttacttgaggctctgggacagtggttcttaaccccggctgtctgttagattcccttgaggggcttttaaagatagcaattcccaggcctcacctcactgctctctgaccccaaggattcaagttcaagtggtctgggataaggcacccccagggctgagagctaaccactgttgcaggcagtgaaacacaccagcatctgccccctgatgaggaggctaaaagcactctgggacttaacaccctgccgtccctgacacctgctttcaccccaggttctgaaaagtcctgtttctaagccctacttaaaatgaatccatcactgcttgaacccgggaggtggaggttgcagtgagccgagatcatgccactgcactccagcctggcgacagagcaagactccattcaaaaaaaattttttgagtccatccataaacttcttaatcatcttgctttccattcagtgccaggcaaatggaaatgaacattttcctgttcatgtaacagagaaaagagccatggactgttggtgggaactccatccctggaatagagcaggggcagttagccctttctctgagctcggggaacgaacacacatagataaggccatcctcatcaactgtatttggatttctgccaccctgtgattcctcgggatccaaggggcaagaggctgcttcactgtggaaaactgaggaggcttgagatccagatggtccatgattttcccccaaagctcccacgcacagtgccaaccaaacactgcagcttcttccacacacaaccactttccaaacctgctttgaaaaagtaggcattgaagctgtgcatctgttctaacacgaacttggaagctggtcctccaaggggtgaagcgctgcctgttggggccagaacaatcaaacacgacaatcaacgctaggccaatcctagaacattccaggagcaaatctagctgactcgagtctgaaggttctctccaggaaccagaatcctctgcattctctccagctttgcctttttcttaacagttatgcaatctcatttcttctcttagcttcctctagctgaggcctgaggggtgaattcgtgcttctatttttcctgaccttcacccccacttcctttctgcgatgattaaaaccccctaccctttagtggaaggacaatcctgtgaaggctgagcccgccgctctctctgtggccggcctcagccagttgagaacagctgttttcatctttatacaaaaccaggtcagcacactgtgtcttggaggctgatgctgcctcacagagatgactcctttctgtagaaaactgcagccttagcatccagggccagactcttacctcatgcaatgatagagaaaccaccgtttacacagccgttcccggcagcccaacagctcatcttttgtttgattcccacagggtgggagggagtttcccagcatccttggtgggcgccaccctctgagccccacaagttcagaggcccatctcctcctcttgccctggcacacagggaggctgaaccccagtgcaagccgtgacatcagagcacagcttcctcccacagggcatcccctacccatctgcagcccagacagagccaggccctctgaagtctgtccagggcctggtctctgctctgctaggagtagacagaagtcccagaagcccacccccatgccaccgggcccctgtccctcgcccagataactgtttcctaagaaacaatagagtgtccagaacttttccacggttgttttttcagacccccgagtccagcctccagagttatccgttgtctccgtttgattgactgaagcctttgtctctaaaatgcctccctgtcgctgccttgttgctcaagtaggttgagtccgtggagttcaacgtctgggacatcgggggaccggccagcatggccactgtcaaccagtgcttcttcacggacaaggccctgtacgtggtggtctggaacctggcgctgggggaggaggccgtggccaacctccagttctggctgctcaacatcgaggtgaggacaccagacgccagccctgccatttcagtgcccagagctttgcaggtcccaccgcttccctcaagcatcccctgtactgagaaaaaaagggggttatgttgccacagagggccccagaaccgtggtcctgcttgcttttcacagtgaggcacttgaaaccttcctctgctgagggctggtgatgtaatttccccgcttcccttaaatttaggaacccccacccttggatccaaaagcagagcagggttcccttcctgttataaagatgtccttgtctccctgcctctgatggctgctgtcatgtctgaagggtcagaaatccctccccacaagtccaactcagcaccctccgtggaggaggtcacagaacaccatagacacccctcaatgcaacagtccctcaggttcacggagaatgaggagcacaggtgctgcctgggctgacatcctgtagcgcagtctgttttgcattactagaaaggaatgagactgggtaatttatgaagaaaagaggttcatttggctcacaattccgcagactatacaagcatggcttcagcatctgttggcttttggttaggcctcaggaagcttttagtcatggcagaagggaaggggagccagcatgtcacatagtgagagagggagcaggagagacaggaagaggagccagcctcctttccacaatcagctcctctgtgaactgacatagggtgaacgcacccattactgcaggaaggtgccaagccattcatgagggatctggccccatgacccaacctcccgtcaggcctcacctccaacactggggatcacatttcaacataagatttggaggaggcaaacatccaaaccgtctcaaggctgcagattggtggctgagcaagggccgtggcatccagggtcagcgcacctgcacagctgggagctctgtcctgtcccttgttccatgaacagagacagtactcagccgtggggttctctgttgcaggccaaggccccaaacgccgtggtgctggtggtcgggacgcacctggatttaattgaagccaagttccgtgtggaaaggattgcaacgctgcgtgcctatgtgctggcactctgccgctccccctccggctccagggccacaggcttcccagacatcaccttcaaacacttacagtgagtgcccagcctcgggcagctcctgccttcttgtgggtgccagtcgctgatctttcctgggatcagcttgcagagagctcctgagtctgggtggggctaggcccctttcctggccaagggtggccatccacagagctgacccagccttggggagggtgaagacctaccagacggctggctggttgaggcctggaggtgcccctctttgcttcctttctgccccatccccgccccaagggccagtgctgaaaatgcatggtgcctattgaaccaggagactgaacgtgggcaccacccaaccaattgctgcccatctcatttgttgatcactgatcaaggacagaccctggggagggagggccagtccttccattgggtctgagtggtcctgatagcagcctttgagtcacagagggccaagagtttggaggggctttcagttaggcatcacgacgtgtccatacagataagtccaattgccctgggctgactgcctgtcactggactttcacaacagccctgcaggttgtggggattgtttgccactttgtaggtgaagaagatgaggttcagcaaattaagtgtgccctaatgggagtaaaatacactgcatattgcattatctgcactgatggctctcagattccctcgcccggggcagagcgccacgggtattggtgcatgggtcagcctgggacacattggcctggctcggaatacaggatgaggctgtcaggaattcctgctttgcccttgagaaagtcccatggggtctgtgataagaggagtcctggctctgggtcagaacccaagtccagcctgtgtgagcctgtgcctgcccagcctgtacccttgggggtctcggtgtacctctgcacctcactttcctcctccgtgaagtgccatgtttagtctgggaagacagactaaagcgacacagtgtggggcacccagcacagtgatttgcacaaagcaaggcctcaataaacttcttgtgttgtctttcacgagttctccagacttgccagcgttcaggacaaacctctcagggaaacagagaagcagcagcgcttcctcggagtggggcatgatgagtaaagacgggtctttttgctcacagtgagatttcctgcaagagcctggaaggtcaggaagggctgcgacagctgattttccacgtcacgtgcagcatgaaggacgtgggcagcaccatcggctgccagcgactggcagggcggctggtgggtaccttgctggtccagtttaaaccagtctgcctgcttcccattgttgggggtcctcacttccccctctctcctgtgaagcccatgtctgtgtggcaaggctcggtggttcctggtgagggagggtcaggatggaagatagtgggtggaaacgtcccaccccctcaggccacaggggccgggcaggatctgcccaagctggcaggtgtgccttgggacctgagagaccctgcctcgcccaactgtcccccagatccccaggagctacctgagcctgcaggaggccgtgctggcagagcagcagcgccgcagccgggacgacgacgtgcagtacctgacggacaggcagctggagcagctggtggagcagacgcccgacaacgacatcaaggactacgaggacctgcagtcaggtgggtggggctggggtaggtggcagggtgcccgtgagaaatggaactgtctgtacttgctaacttcagcttggcctcagtaatgaatgagagaccgacacccagcctgcgtttctgccttccatccccctccccttccttcttccctctcacccttctttccttggagggagagaacacaaacagctactctacaccagcattgtgtttgccacgaggacagacatacaagctgatggactggcgcctgccctccggggctgatattcagtcagggagacagaggtcaaacagttacaatcgattctcattagccacaggacttaacgttctgtaaagtcaccgcgatcactgaaatagcaaatacggaaccagtgctcctaggagagacgcagcgttgggctcctgcgagcctctggtcaccacatactcaccagcccgtcagtacagaaccttgttttatgtgtgttgctgcgtaaagatgccatacttaatatatgttgttgatttgttggcattgaactcacggctgacagcactattgctcattcatgaacaaagcttatctaacacacaggtttcctccataaggcacatcgcagccttctcacgcttagggaactacacagcgtttcagcacttcactagggaccattttgaacagtgaaagcgtcaacaaaaagcacaaaaattcaaaaaacgtggcactgacatagaccactaagcaggcagctgttttcagcatgagagctgagagagttgtcctgttcagcctccgctggcaacgtgcacattggtcaatgcaaatttttcaccactcagcacatgtctgcaaataaccgcaggagtgctgatttggaggttgcagatcaatcttagcaagaaggtgaatttgcaaaggcaaaatccacaaataatgaggatcaagtgtagttacccaggcggccatcagcctaggactttggcaagagttaccaggggccaccagggcacctgtgatcaggctgccagcccacctgaagggtccagcatgtgggacatgttggtttcttctcaggaataatttgtgacctgggtcctcttggaaagagggccaccccagagtccctttcgctcctttgtctaactgctgcttcctcctctccttgcctggggcagccatcagcttcctcatagaaaccggcaccctgctccatttcccggacaccagccacggcctgaggaacctctacttcctcgaccctatttggctctccgaatgtctgcagaggatctttaatattaagggctctcggtcagtggccaagaatggggtgatcagagcagaagacctcaggatgctgctggtggggactggcttcacgcagcagacggaagagcagtacttccagttcctggccaagtttgagatcgccctgcccgtcgccaatgacaggtgaggacacaacttaacacgccaggctgtgcaggttgctccccgaaagagggagttggggtctggagccactggtggcctgaacaagatttccagggatcagtgctgccactgctgccccctacggacaggccagcacccgatgacctgcctgccgggcctgggtcagcaggacagtgagcacggctggccgctccctcctgtgccacgggcttctctgttcagggagttaaaagaaatccacttattgaaaaggtgtaggaaaacatggaaggatgtcattaaaaataatttgtgggaatttcactttacaggggcttgattgcttgattatttggtaaatgagagtgagtggccaggtgaggtggctcacacctttaatcccaactctttgggaggccgaggtggccagatcaattgaggtcaggagttcaagtccagcttgaccaacatggtgaaaccccgtttctactaaaaatacaaaaattagccgggcatggtggtgcatgcctgtaatcccagctacttgggagactgaagcaggagaattgcttgaacccaggaggcagaggttgcagtgaacagagatcacagctctgcactccagccttggcaacagagcgagactccttctcaaaacaacaacaacaaaaaaagaatgagcgactaggatgtgcatactaattacacagcccagttccaaatgcagtccaacatgattaaatcatgagagcaacatcatcagctactccagggtggatggtccgagggtcaaatagaggcattccatatagtagctgatcattgcctctttctgtggacttctcctggatctgtaacatacccaggtctccccagtcctaaactgcaaacaaaacaaatgagcctctcctccttttcctccttttcttgctccccagcacctgccgctcctcatgactttgtgctggtcgccaggtagccctctaggtgcccccaggtacctctcctgtcctctgctgaccctgccccaagtactgaccctcccctctggagggccttctccatgagaggaccttgccaccctcccttccagcccgcagtgtcctcagcaggcccctcccctgcactttgcccaagccatcaattcagctgccttggtcctccatgcagctttggggtcctccttggtccgccaaaggaagaatcctcagattttcagcagggcccagcctccagaggctcaggcctgagcttccaaattgctcccacctggaagtctggcacggtgactgacacagcatgtctgagacacctgccttctctcctctgctgtgtggtcccaccgatcaccttcccccacgccccacccacggaactgtgctcagggagtggcactctaggctccaaattcctccctgtacccctgacacccactcctcaccccacctggaatgacatggccctgccatctcccagtgaaacaattctgttgacagcccctttcctccttgtgacacccatacctgcttctgtttttgtttgtttatttacaaagattttttccatcagttatcggggtacagttggtatttggttacgtaagttctttagtggtgatttatgagatttctggcgcaccatcacccgaacagtatacactgcaccctatttgtgtcttttatccctcgcccacctcccactctcccccaagtccccaaagtccattgtgtcattcttacgcctttgcatcctgacagcttagctctcacatatcagtgagaacatacgatgttgggtttcccattcctgagttacttcacttagaataatagtctcccgtctcctccaggtcactgcaaatgctgttaattcatccctttttatggctgagtagtgttccatcataggtaaagtttacttacagtgaaatgcccggatcgctagtgttcaaaacaatgacttttgacaaatgcatacaactgtgcaagcagcacctgcctcaagacacagaatgttcctgtcatactggaagttccgccagacgcccttccagtcgcttcccatccgtgtcagcaccagcactctgacttccagcaccagagcctactgtttcctgttcttgaacttctcaaccgcacagagtcacgcaatatggtctctaattggcttctcgcactaaacatcatgcctttgagatccatccatgcggttgtgtgtatcaggagtttgttctttctgttgctgagtagtattccattgtatggctttactgcaatttgtttatccactcagctcttgataggcatttggatggtttccaactttgggctatgatgaataacactgctgtaaacagtcttaagtctttttggagacacatgttttcatttctcttggatcaaaaccaggagtggaattgctggataatagagtgtaagtttaattttataagaaatcaccaggctgtcccccaagagactgtatgctcctccaagagactgtacactccatttcctccccactattttttttttttttgagatggagtctcgctctgtcgcccagactggagtgcagtggcacgatcttggctcattacaagctctgcctcccgggttcttgccattctcctgcctcagcctccaaagtagctgggactacaggcgcccaccaccgcgcctggctaattttttgtatttttagtagagacagggtttcaccatgttatccaggatggtctcgatctcctgacctcgtgatccgcctgccttggcctcccaaagtgctgggattacaggggtgagccactgcgccggcctcctccccaatatttgttgtctgtaggtctttctgattttagctattccagtggatgtgagcttgtacttgactgtggctttactttacattttcttcatgactaatgaggtctagcacctttcgtgagcttattggccgttggtatatcttcttctgtgaagtgtctattcaagttttatgcctattttatgattagaatgttttcctttttggtactgatatgtacttctttatatcttctggatacaagttcttttttttttattctttaagttctagggtacatgtgcacaacgtgcaggtttgttacatatgtacacatgtgccatattgtgctgcacccattaactcgtcatttaacatgaggtgtatctcctaatgctatccctcccccctccccctacccgatacaagttctttctcagatatatgatttgcaaatattttctcccagtctgtgacttcctttttttatattaatgaagtctaacttttaaattgtgtgattattgctttttatgtcatctttaagaaatatttgcttataccacaatcttgacaatctttctttatttttcttctagaaggtttgtagtttagcttttacttccaggtctataatctatgtcaaattaatttttgtatatggggtgaagtaggggtcgaggtccatttttttcctgtatattatcccattgttccagaaccatttgttggaaagactttcctttccccatggaattatcttggtttctttatcaaaaatcagtgatgtgggtttatttcaggactctattttgttccactaatatatatgcctatccttatgccagtgccaaaccccactgattattgtagctttagagtaagacttgaaatcaggttgcgtgagcgttttgtattagtttcctgtgattgctgtaagataccatgaatgtggcatcttaaaacaacacacatttttctggaggccagaagtccaaagtaagtttccctggtccaaagtcaaggggtcagcaggatcatgctgcctctgaaggctctagaagaaaatccattttcttatcttttccagtctctagagctgcatttcttagctcacatttcttttatcaatacataatattttacgtatttatggggtacaggtgagtagtttttacatgtgtagaatgtggaatgatcaagtcagggtatttggggtatccatcactttgagtatttatcctttctatgtgttggtatcatttcaagtcctggcttctaaccactttgaaatataccatatattcttgctaactatcgtcaccctagtctgctattaaccattagaacttatttcttctaactgtatgtctgtacccattcaccaacctctcttcctcccactctcacacccttcctagcttctagtatctgtcatgctattttctatcttcataagatcaagttttttagctcccacatatgagtgggagcatgcagtatttgtttctctttgcctggtttatttcatttaatgtaatgacttacagtttcatccatgttgctgcaaatgacatgatttcattctcttttacagccaagtagtattccattgtgtatatggacctttctttatccatttctccattgatggacacttaggttggttccttatctttgctattttgaatagtgctgcaatagataagggaatccaggtatccctttaatacctgggttcttttcctttgtataaatacccactagtgggattgctggattgtatggtagttctatttttagttgtttgagaaatcgccatactattttccacagaggctgtactaatttacattacagccaacagcgtataagagtttttcttttctctgcgtcctcaccagcatctgttattttttggttttctgatagtagctgttcaactggggttatatgatatctcattgtggttttgatttgcatttccctgatgattcatggtgttgagcatttttcatatacctgttggccattcatatgtcttcttttgaaaaatgtctattcatgtcctttgccttcttttgagattatttgagttttattgagttgtttgaatttcttgtaaattgtggatattagttccttgttggatgaatactttgcaaatattttctctcattcaacaggtctcttcactctgctaattgtttcctatgcagtgaagaagccatttagtttaatatagtactatttgtctatttttgttttagttgtttgtgttttcgaggtcttagccataaaacctttgcctagaccaatgtcctgaagtgcttaccctgttttcttctagtagtttatagtttggggtcttaaatttaaggctttaatccattttgagttgatttttgtatgtggtaagagatagggggtctagttccattcttctccatatggatatccaattttcccagcaccatttattgaagagggtgtattttctccactgtaggttcttagcacctttgttgagaatcagttgactgtaaatatgtggatttatttctgggttctctattttgttccattagtctaggtgtctatttttatactgatatcatgctgttttggttactatagctttgtagtatattttgaagtcagatagtgtgattcctccagctttgttctttttgctcaggattgctttagctattcaatctcttgtttggttccatatgaattttagaatccattattgatctgttcaggtttactttttattcctgattaactttgggtaaggttttatatttctgggaatttgtctgtttttttttcctaggctttgcagtttgttaacatatagttcttcatagtagtctctgatgatcttttgtatttcggtggtatcagttgtaatgtctcctttttcattaccaattttggttatttgggtcttttctcttcttggttactctagctagtgatttatcaattttgtttatctttttgaagaatcaacttttcatttaattgatcctttgtattgttttttaagtctgtattccattttatttctgctctgacccttatttattatgtggtttctttccttctgctgattttgggtttggtttgtaaatgtctgtaaggtccttttggtctcaagtcatttaaatccaatgtttttttgatgagtttctgtctagatgatctgtctaatgctgagagtggtatgtttaagtgccatactattatagtattagaatatatctctctctctagatctagtaatatttgctttatgaatctgggtgctccaatgttgggtgcatatatattgatattgttatattctcttgttggattgatccctttatcatttcttctttgtctttttactgcttttgacttaaagtctgttttgtctgatacaagtatagcgatgtctgcttgcttttggctactatttgcatggaatatctttttgcaatgctttactttcagtctatgtgtgtctttacagataaagtgagtttcttattggtagcatataattgaatcatgtttttttaatccattcagccagtgtacaccttttaagtggagaatttaatacacttacattcaaggcaattattaatatgtgaggttttgttcctgtcctattgttaattattttctggttgtttttatatattctttgttcctttatttctctcttactgcttatcattgtggtttggtggttttctgtggtggtaccatttgagtcctttctcttcctcatttgagtgtttgctttaccagtgatttttatacttttgtgtgttttcatgatgttaaatgtcacttttctttttgcttccaggttaaggatcccttgagcagttcttatagggccagtctattagtgacataaggtttctgctgaggaatctgctgttagtctaatggggtctcttaggtgactagattcttttctattgctgtatttagaattctctctttgactttagacaacttgactataatgtgccatggagaagaccttcttgcattatctctgtttggggatctcagagcctcctgtatctggatgtctaaataccttgctagacgtaggaagttttcatctcttattttgttaaataggttttcctaaccctttcattctctcttcaccttctgggactccagtaatttaaatacttggttgctttatggtgtcccatatatcactcatcgagaaaatatttactcattattttcttcatttttctttatttttgtctaactctgtttttttcataagacttgtcttcaagttctgagattatgattctgcttgatctagcctattgttgaagcttttgaatgtattttatatttcactcaatgaattcttcagtcccagaatttccatttggttttttttaaatgatattaatatctatctctttggtaaatttatcatttgtatcctgaattgtttttctgatttctttgtattttttttagaattttcttctatctcactgagctcctttagtatcagaatttttaattatttttccaggattttataaatttgttcttgattaggctgtatggctggagaattattgttttcctttggaagtatcatatgtccttgctttttcatgtttcctgtgtccttacattgatatctgtgcatctggtgtaacagtcacttcttccagtatttgaatttgccttcacaggggagaactttctcctgaagaggcatctgtggtgttggttcagtagggcactttggctttcattctatgtagatgcagtagtgtaatctgtattatttctttggctataaacaatgtcagtggcatctgtgatttcctcagtaatttagggtgcagttgttagtggagcttgtggggaagttttgctgggaacagggatgccaggtgggccagtctttgggccccagtggtggcagcaggcatgcctctccttggaccccagggtggtatacactggcaccagtgttagagggtccagacaggcctattcttgggcttccaggaggcttacttggatgttggtagtggcatcagtgggccaggtaggtggctgggttctcaggtccctaggcagctggcatggtgtgggtaatggcagtggaagtggcaggaaaaccttgtaggtcctgagcagtgcatgctggtattggcagtggctgcaatgggctggttgggcttgtgcacagggccacgggtgacatgtgcaagtaggtaccagctgtagtggtaacagcagagtcggtaggcccaaccttaggccctcaggagaagtggtcaggtaccactgatggtggactgaaccactgagctgggcagtccctcagccctagtccacatgctctggcacaggggccaggggacatgaagccaggtcaggtgggcttgtattcaggcccctcaatggtgtgtacaggtaccagccatggtaggcaggagtgaagtgatccccaggccagcaatggaatgctcaggctggggacatcagtggccacactgctgccctgccactggggagggtgggccaccttcagtggcaacagattaggctggtgggtggggaacatatgccactcacaccttagcctttaaggtggtagcctatgcctcactcacacctcagccccaggggtagcagcccacatttctcttgcacctcagccccagcaccactgggctcccggacagtacacagtctgttggggacagggctgtaaaatggctccttgcagatttcttaaagaactaaaagtaggttaccatttgatccagcaatctcactactggctatctacccagaggaaaagaagtcattatacaaaaaagatacttgcacacacatgtttataacagcacaattcctaattgcaaaaatatggaaccatcccaaatgtgcatcaatcaataattggattaaaaaaattgtggtatatatacaccatagaatactactcagccatataaaggaataaaataatggcatctgcagcaacctggatgaattggagaccattattgtaagtgaagtaactcaggaatggaaaactaaacatcatatgttccaaattataattgggagttaagctatgagaatgcaaaggcataagaataatacaatggattttggggactcaggggaaagggtgggaggggatgagagataaaaaactacacatcaggtactgtgtacactgctcaggtgatgggagtgccaaaatctcagaaatcaccactgaagaactttatcacgtaaccaaacaccacctgctccccaaagccctattgaaattaaaaattaaaatataaataaattgcctccttagtgtggctgctcaggtctcagagagtgtgagacctagagtgagcaccctccgagcagtgccattgcacaatctcccatcagttagtttcagggcccacaaagggtgaggggctctcctgtgccttggatttcaggagtccagagtgggaatgtcgaccactggggatctctcacttacctttccccacactggggagtctctctcagctctcagcctagcaggctgccttgcttccttgtccttccttgccttaggtatttcctgtcacttttctgttgaattccagtgttccctcttggatgatctattcaacgtgtgattatctactcactattttgcctcttctcagtgtcagaggcaagtctgaaatgcctctagtcagccatcttgaagccgtccctcccagcagcatggcaccctgcgccagtggccatcttgccttcttctgtgcaaatctctctcttcccccatcttttaagcacacttgtggctgcacttaaggtccacccagataatgtgggatctttcccccatttcaaagtccataacttaatcacatctacaaagtctctatttccatgtaaggtaacaatcacagttctagggtttaggacctggatattttggggctcattattcagcatatgacaccctccaattttgttcttctgtttcaagattattttggattattctagatcctttgcattttcatctaaattttagaatcagcttgtctgattcttaaaaaaccgttgtgatttttatggagattacattgaatctatagatcaaagaaagctgacatcttagaaatattgaatcttccaatatgaacatggtatatctctcatttattttggtttttaaaaagtttctctccacggtggtttgttttcagtattcagattttctgcatcttttgttaaatttgtgtctacataatttatgttctccgatatgggtaaatgacatatcttctaatttgatttccatttcttgttgctggtatacagaaatataatttatttttaaatatttaccttatatcaaaaaaccttgctaaattcacctattagctccagtagatttttcaggattttctaagtatgcttcttttttgaaaaaaagacagttttacttttttcattctaatcttcacatatttttttgctctgtttgcctgattgcattggctcggatctctagcgaaggtttaaatagaagggatgagagaaggcgtcattctgtgtgatctcaggggggaagcattcagtctttcaccatcaagtgtgatgttttctgcagagctttgttatccatggaaactttatcagattgaggaagttcccttttattcccagtttgctaaaagcttttatcataaatgggtactgaattttgtcccccaaaaatgcttgttctgcctctgttaatttttttcttcagttatttttctgttaaatatgttgatggattttcaaatgttaaaccaactttgtattcccaagattcataccaagtgttcatgatttattatcttttttatctaatgctagatttcagtggctcctattttgcataagaattttttaatctatgttcatgagggatattggttggtactttgatgaaaagtctttatgggttatcagacataggctgtcttcataaaatgaattgaaaagatttttttccttctctattttcttcaagattttgtataagattggtgttagaccttccttaacagtttgatagaatttatagcctggagtttacttcacaagaggatttttaattacaaattcaatctatttattagctatagggttattaaaattttctattcttgtgtcagttttggtaagttatttttttttcaataaattttttcatttcatctatggtgcagaatatattaatataaagatatttaaaatatctctggaatgtgtagtgatatgctctctctcctgatattaataatatgtcttttctctcattctttcttgatcagtcttgctaagtgtttatcaaatttttggaaccgttttaaagaacgaaccgttgccattgctgatttcttctattatttttctcttttatttcatctattactgctctttattattgtcttccttcagctaactttgggtttaatttgtgcttcttgttcttccttcttaaggtagaagcttaggtcatttattttaagcctttcctattttctatgtaagcatttaaagccataactttctaagcactgctttatatgacaaatacaactaattttgctatgttgtgtttttatcatttagttcgaaagattttctaatatatcttatattattttggtcagagaatatattctaagatttctgtattttgaaattcactgagacttattttatgggccaatgtgtgatctttcccagtgaaagtctggagtgcacacaagaaacgagttttctgtgttgtggctgtagtatcttataaaccttaattagctcagagtggtaaacaacgtgttcaaatcttccgtattctcactgatttttttcctactcattctatcaattactaagagagagatggtaaaatatctaatgataagtctacctctctctccagttctgacaggctttattttatatattttgaagccattattggttacatatacacattggtgtcatgcctgtgtaatgaagtgacccttttttcattatacaatgtttctctttatcactggtaatactccttttcttgaagtctattttgtctgatgttaaaatagccacaccagctcttttagttctacctgggttttttccctattcttctagtagcaggttatgatctctataaaaaaggaatctcttgctgacagcacattatccaatctgataatctctgccttttaataggaatatttgattcattcacatttatcataattaattatatggttgggtttaagcctactatttctctatttattttgtatttataccatctgattttgttattttgttcattctttcctgccttcttttgagttaaattttattttagtattttcatgctctctgttgggtttttggccattcttcctggtactgtgttttagtggttactcttgggattagaatatgcatccttaccttatcacaatctacttgtaattaatattataccaccttgaattaaatgcaaaaaccttagcacgataccaggacattactcctcccagcaccctctgtactcttgctgtcatccacgtttcttctatacagtagtcccccttatccacagctggtggatttccagacccccgtggatgcctaaaactgcgatagtattgagccctacatatactatgccttttcctttatctacatacctatgatgaagtttaattgtaaaccagtaagtgattaacaacacatagaaattaacaacaataacaacaaaacagtataattatgatatactgtcacagaagttacataaatgtggtctctctctctctctttctaaatatcttgatatttttggaccagtaattgaaaccatgaaaaagaaactgcagataagggaggactacaatatatgtaatgaaccccataatatagtgttattacttttgctttgaataattaaacaatcaatagtcttttaagaaattaagggaaaaatgttgattgtttctggtgctcttcacttctttccatctggtataatctcttttcatcctgaagaattacgtgtagcatgtcttaaagtctaagtctgatggaaacaaattctcttttttagacaagacttttgtttatatgaaaatgtctttattaacactctaattttttgctggataattttcttcgatgtagaattctgggtcatttttctgtcagtctttttaaaggtgtcaccccattgtcttctgggcagacaggggtcctcctcagtcttcgtcacccctgacccctcgctgaggacctctgaccccatgccacctcctctcatgtgatcaaggatgcccagccacctgctctgctgcagcccaggggcctctgagaagcctactgcccctccgagagctctgccaccatcctcctgtggcttttactgcccttacactcccctacttgttacctcttacccacctgcccggaccctcagttatgctgtcagcccttgagcattgggcagcacacttctctgcctccccacagcatgtgctctggccctggcatttggcccatggaaggcaggggagagggagtgaggccccctatccttacaagcagggtgctcttgtcgggggatttgtgcagactctttatgagctattacttaacttttcttccttcaaattctcacttttgaggcttggttttcatcaaaaccaagtgtagtgttggcttcttctttcctcctactctcctctgtgctacccattgccaggatatatcttctgaagtagctgaactgaacgcctcccctcggggtgggacccctacgagggccaggctgggggagcacacgaggggtgagacctgccatgatgctctgccctaaaccagcttggtcctcaggcctctgagtactagtttccatatcagccgcttcctgggtttgatgctgatattggcaatgaagctgtatccaggatccaaatccacaggatccaaatccacagaatgttgccatgcagcacccagagaacacgtcgccactctgcgtcctcagctccagatctctacaggggtgtcacctggagacttctggggagcaggcctggatcctgcacagtgaggccagagacccggccacctgggaaccagccactggccccacctttgcctgaggccccacccacctcccactaggtatgggaggggcctcaagtctttcttgctgctccagctctctgggttccttacaaaataaaaccccaaagaggaattcaaaattccacagcccctcataacatggcccagcggtgtccttaactttggtccatgagaacgttcagagtaaggcagcctgtgtgtttacaacattgccggatctgacaactttcagattgttttatcgcaggttagaggagtgaggagatacgagtactcagtaaaagaaagtcagttatctatatgaagtcagtttttatatgtataaaacgtacacgtatttataatgtgtgtgtgtgtgtgtgttggcctgaacaagaccatcagtgtgatcacggccaggtcctcaccaaggcttatggcacagcaggttagaatatgaagttgggacgcacaagtatgaatcccaactaccttctttctcgtctgcataatgggtataatataattaccataagtatgatagttgttgtgaggattaaattagataatacatgtaaaatattcagaccagcagaaagaaacagtagcaggcatgtcccagggcctcctgcatgggaacagccactgacaaatacatgtaaaatactcagaacagtgtctcttaagctcccaagacatccagtattgacagtccagttattgttactgtttcttcgtggtaggtactcatagccatggtgtcgggttctgtacacatccaggaatagtgggacacgtttcatctcagcacaggcataatggttcccttgagccccaggcaagtccccgctcctggcatcatcagctttctaaggctgctgggatccctggatctgtgcaaacagacacatttgcggctcctctcagagcatggtttcccacctgcagtgaacccctccagcccctcagaaaatctccatgaactccctggaagtaccatacagttttaagcctttgtgcttctttcaggaggaaggtccttgcctctcagcagactctgagaagggctgcggcccctgtctgaggctgtctcagtggggtggcatgagccagcacctccgtgcagacactgtgccctgccagggtttcactgctttacgttcatcaaacacatgaagaatttacctcttaggacctgtcctgccgactcactggtcattccctgggacggcctttcccagctcgtaattgctctgaaacccggagccagcggcctccactacctggagaccactgcttcccttgagaactggcttctgtggccactcaggatctctttatttgccatgtcaccttctaaacctctgccctcaaaaacatcatggagcacctcttctgtgtgccaccgcacatcgtgctgggacgcctggggacagagaatgctccccccactctctaagcacactccgacaaggagaagagcaagacagacatggggcaccaccactgtaagagggccacatgagagacccaggatgcatgagatgaagtagaaaaagcagaaagaaacagcaggcacggcccagggcctcctgtatggggaacaaacactgagcagatagagaagcaaggacttttcagatgtaaaggaataagacaggacactctgatgaagaggcatctagcgagaggttgggaatgtcctttcactcaagacctgaaaggctgaaaaggcctcctgcttcaccacctgtgtctgctgtgtcatctgcacagcccccgtctaccttcaccagccctgccaagaggggatcctttctctccccattgtatacccatgtgtcagagcgtgtaagtgagagccgagacttgcgcctgtatgctcgggccatgggctgtcactgaattttcttacagtttagggagtcttttccagaaagttctaaggacatttattggactgaaatagatttaagattaggagagctgaaggtaaaacctttattgggaaggagtgcagcatctgcacaccaggggccgtcctgtacctgtccagtgcctgcccccgcagccccacaggatgcagccgttgctggttttcgggcacccttttggagggacctcccaggtttcagccgtgaagcccttgccgatgcaatgatgcagcatttttatgatgaccgagagtgttctcgtaaaacatccctcttccgcacaaaacaggcctattctaacttttaaggcaatcgcgtcgtgtcaacgggccaagaataataaatagctttaaaggccaaaaatgttactctgaccctaatatctgcattgtccttgaaaccttgcagctgtgtttgtttttccttcatcaaccaaagttaatgttatttccccaactgcaaccccgtttatagagaattgagtcccatttgctgtgtctgacatttttaggaccatgatgttttcatgtcttcccttagccttattctagtatcttagaaaccatgatagactcatattaatgggaccagtcttcattttcctttggagtatttattcttagcatataaaccacgcttctcttactaataacagaattccaaaggccctgggaggaaggaacccagcagcctgaggtgttccagcacagcctgtccccagatcaggccatctgctggggtcagggccctgcagtggagcttgggccccactgttcaccagtcccccttggtgtgtttcagctacctcctgccccatctccttccatctaaacctggcctggacacccacggtatgcggcaccccacagccaacaccattcagagggtatttaagatgagcttcgttcccgttggcttctggcaaaggtttatagcacggatgctgatcagcctggcggagatggacctgcaggtattatggctgcggtttctgcatagacagatgcccgagagccacctacagttgtaccactgggggaggggaatgccctttgctggggggccctgcctggagacccttctcctagagccatgccaccaatgtagtgccagggggcaggtgtggcatgggctgctggccaacccactgaagccatcctgggagttccaaagcagcaccctccttagacagaacacgccctttataaacagtggttctcagtgttagcccacctcaaaaccacctggagtttgttagaacacagtttggtggccccacccgaggttctgattcagtaggtgtggactgaggccaagaattcacatttctatccattccccgaggtgatgccgccggcccagcaaccacacttggagaaccgtgaagttagaagcacggttttgccgtcctggctgcacgctagactcgcctggaggaaattctaaaagacacagaccacactccagaccgattgaatcagggtctttgagtgtggcatcatttgaaaaagtgattcctctttggtatttttaaggctcccaggcgagtcccctgtgcagtccagtttgagaaccacttgtgcagaactgtacgttggttctggtaacacgggagaccccccgcccaaggagttagcttctgtgggtttacctggggttacaggaaggcgtccccgctgtcagacaacattaatttcatgcagggcaggaacatggaagcaacatttgctacagtggtgtttttcaaagtggggttcctataccagcaaaatcagcctcacctgggaacgtgtgaggaacacacgttctcaggccccacctcaaacccactgcatgagaaactccagggggaaccccgcactggttttcacaaccctccaggggattctgacacacttttggttttgcgaacctctggcataatccctgactgtcaaatccttgacattaaactccgtatgagtttactgttgctacatcctaattagaaagcccttattgaattataacttcttagctctataaaaatgttctttgatcttcccatttttaccgaaatggtaagaaaaaaatcaatgcaaaagccttaaagtccatcgtgacagtagcagcctgtgctagcggggagggagatgggttaatagcgccagaagggtgcactgattgaaggagtgggcgcaggcgctggtgctcctacgttcccattcctctgccctccctttgaactctgtgtgccgctgtcttctcaagggagggtcatggagcactagcatcgtgggaggctgagctgacaagtggggcccagctgggcctggaggccagggcgcccttccgggcagcagcttccctcactcgaagttaggaaagaagtcctattgaaattcagatgggtgacaggagggggaaaagagtgcagtctcatcactcatcaaaggcatgcaaattcaagcagcagtgagatgccagttttcatccatcacattagcaaaaagctgagccgtaatccccagcccggggcacggagcggccccgcgcacactggtagtcagcgcacaggacagtctcgtcgttcgagaagcgattcctcgggatacatccagagctttaaaacgatcagacccttcgaccaataatccgactggtaaacatctaaactgaggacatcattttcaatcagagaaagctctgtgcctttctcatgtaactcaaggtggttttgagggagcaaaagattggcaccaacttacacttccagaagagagtggttcaggaaattactatgcttaatagaatattaaactttagaaaaatgaattttatgtgtgtttttaatggcataggaaaggtggggttttttaacatatacgaaattagaaatccaatatggcttcagctgtttttcacaaacatatggagatagaaaaaaaaaaaatcctggaataatatataccaaaatctgaatgatctctctgcttggtgttaaattggtgttttgttttccctcttacatttttctgtattttctacattttctaatatgaatttttgcttgtaaagtcagaaagggaaaaaaattttaaaggaaagcctatttttcaattctttggaaaaactgtgtttccggaattccctggagaccccgtcagctaatgtaacgttcaatttggcagcagggatgagcagcgtgggaggagagggtgggaaagatgggggacatttatcaagatggggcccagcccggcctctgcagagctctgcccagggccagcgaggagcccagaatacttaagcagggtcttttctctgtctttcagctttttgaaaacaagaagaatactaaaagcaggaacaggaaagtcaccatttacagttttacaggaaaccagagaaatcgctgtagcacattcagagtgaaaagaaatcagaccatctattggcaggaagggctcctggtcacttttgatgggggctacctcaggtaggaacacctggaagcccacctgccaggtcagcaggtgccacagcagccaccgcggggccacgtcagcaggatgcctcatcctcttggtgtccagaattttgctcgtgagagcggctcgtcatggcagcttgctagaaatgtgaggccctcccacgagtgtcccagaggctccggtctcctcacccctgctgagccccccttgcaggacgggaaaggcaaaggcagatgtggcggccacagctgaggacttgagggacgtggcggccattgagctcaggagagcctcaggcacttcccatggttattcaggtcaccatggtgaccttgcagccatcctgcccgtccccttgttctgtgagaagccaggctggggacaggggatgctgagactcctcagcccccatctccactgcccataaccagacacggaactcagctccctgtgccatttattcttggttttttgagagcggtagacctaaagtcagcccaacaggtttaacgaatgataaacacccaagattattttaatgtttacaatgaactttgcaaaatattcttcagctctgtgagaggagaagaagggaaaaggggaggtaactttacagagggcttgattggcacctgcctcttccgcatagatgttctcacttaaggcccagggttgctgctggacagatgagcatactgaggttcagggaggtctgggaacttccttagggcctcacctgagggtcagctcccaggctgagcgtccctgactgcaatcttcctcgtgcctccttcaccaggccaggtccggggcaagaacaaggcagggccacgcacacgtacatacagggaggagtcccccatcggtcctgcagggcacagagtctctccaggtccccgggggttggttcctgtccctgggggtagggatatcatcccagggtcccccagagccagatcgcaatgggctccttttggtctctggattgcagtgtggaatcttccgacgtgaactggaaaaagaagaaaagcggaggaatgaaaattgtttgccaatcagaagtgagggacttctcagccatggctttcatcacggaccacgtcaattccttgattgatcagtggtttcccggtaagaggagatgctagaagcaagccctcattcatgctaatatttcttatgaatcagggtggggctgctgctttcggggtggacaaaaatcccactgggattcagcccaagaaaactagggggtcttaacagcactttggtgggagtcctggcccccgagaagtccagctctgtcactggggggagtcccacggggaggactgggctcggacaccactgggaatgtgcagggaagcggcctgccagctgcccacaggcgtggcaagaaagatgacactggtaccacgagtggtccacggagatgctcagtgtgagctcacacgtgtcttgttttcatagtgaggactgtgtggctgaaattgcaggggagccggcagatggaaatttatcccctgcgcaggggcagggatggaggggagccgtggcagccaaggggccttgctctcctcccctgccaccccacccatcccggcggtgatcaaaccactaacaccgcccttctcagaccctttggatctgtttcttcattgatagttcacccaaaaaaagtactctttgagtgaagttcctgaggcctcctgtttgttttgctcctggggtggagacgactcccagagcagcctgccagggggaggccatctggggtttaatggggcaagcagctgtgggaggggctgccctgagagcttcagccctgaacgctggaggccaagcagctgtgggacaggctgcccgagagcctcagcccctgaacgctggaggccaagcagctgtgggagagcgggtttggaattccagtgccacccctgcaagcctcggctggtcccccggcctcctgggccggcctcacctgcatgcaatgcctgcatcccagacagcatcagggaaggtggctaagaggcagtggcagaatgcactcaggatacacattccagatcccagggtctggtctctgtcagggttggggtccttcacactgttggcaggaagggtgacctacaaggaaaaaaggcttagaaaggagccctcggagaagtcagctgggtgtgcgtgtcatggtgatttgggaggcacttggctgtctaagggggcccttaggcccatgtgaacccttctgggcactttgcagctccccaccagccagtgttccccacacagcaggtgctgggcagtttgacaggtgggtcccttagacagtcacctgagatggaaagggctctggtgagcacctgagacagatcgcctggagccagcatccccagccaggggcccctcccaacgggatgccttacacatggacctgcagatatcagatgtgcctggaaagttctaggcatccacctcctaccttgcatgaagcaggcagttggccggccctgagggcacctccacagggcatcttggagggtgtttctctgcacctcctctcagaggcgtgggggaatcccgtgtccggtgactgagtttcgtctatgataatttgcactcatttctgcccctgcattgcccttcatggacattgtaaacctgatgtttctaattgtaagaagggtgccttccccactgccgtgatggttggaggatagctcacacctagtctgcgatgacctgttagggcccagtcatgcaggagggatccccccactcctctcaggccccccagccagcctgctcagtgtcccgaccactggacagttctcggaagcatcctgaaccctccctggacacatctttcaggacaaacaattgcgctctccaaaaaggcacccgaatgtggcagtgggtttcagcctgtctcttgggtacaggccaggacaggcagctcccctgctgcgaaggcctcagggcctggggtgcagagtgctgctcggggggccctcctgcaccaccttcttgtgaagctgtctcctgctctgtccttatttagccctgacagccacagagagcgacgggacgccactcatggagcagtacgtgccctgcccggtctgcgagacagcctgggcccagcacacggaccccagtgagaaatcagaggatgtgcagtacttcgacatggaagactgtgtcctgacggccatcgagcgggacttcatctcctgccccagacacccggacctccccgtgccgctgcaggagctggtccctgaactgttcatgaccgacttcccggccaggtatgccccgaaggcccctcccagaacacagtgcaggtcacagggggcgttcctcgctgtgcagttgccgagtgatctccaggaagacccctctggggcgggcaggtgccccggccatggcttcccaccaatctcagtaccttttaggttcccatcctcggctgcctgaaaggaaccaggctgccggctttccattttggaggccttgataggcccaactgggaagagtgctttgcaagtgcagccatcctgcctccccatacggctcccccttcccctcgtagccagagctgctctctcctgagctgcctctcctttccactcctacctccccaccagctctagggccagcagataagtgcagccagtgctcctcaagcattcaggaaggggagagaagggagagctcccacccagagccttgtttaccttctttgtcaaacgctgactcctgtctgtagccctagcgctgagctcccacccagagcctcgtttaccttctttgtcaaacgctgactcctgtctgtagccctagcgctgagccttggacccctcaaatctgttcttagagtttattgtacctatgctaacccaagatcataactagagagagaatcggggaggaaataggaaacgtcacctttcagaagaaaacttccaaaggggtcctttctctacggccaccacttctgtggggttcaccctgtgccagccatcaccacctctgaggccgttcctgtcctgagagccctctgtacagaggagactgaggcttagcaagcctgcataacctacccaggtgtgctcacccacaagtggcagggccggggtggcccagatctgtccagcctcacagatggctttgaaccatgactctcggccgttggggcaaatgacccagcccaggacccacccgcatcagggcgggggggatgtggctgatgccgggcgtgtgtggcaggctcttcctggagaacagcaagctggagcacagcgaggacgagggcagcgtcctgggccagggcggcagtggcaccgtcatctaccgggcccggtaccagggccagcctgtggccgtcaagcgcttccacatcaaaaaattcaagaactttgctaacgtaccggcaggtaagcgggtcccaggttggtgctgtttttctcagacatatgctgcccgggtctaagctctgtgcggccttagagaggcctgaggctgcaggcaccccatgtcctactggctgacactgcgctgtccctggcagacaccatgctgaggcacctgcgggccaccgatgccatgaagaacttctccgagttccggcaggaggccagcatgctgcacgcgctgcagcacccctgcatcgtggcgctcatcggcatcagcatccacccgctctgcttcgccctggagctcgcgccgctcagcagcctcaacaccgtgctgtccgagaacgccagaggtaccgcggcgcgccgccccacccggccccggagaccgacagagccccgggcgcctcctgcctggcacggggggtagagcctcaggtggccttggcaagcccagggcacgcccaacccatggctcgtgtgaccatcccctggctgcgaggccaggctccccgccaggtccagtcactaggcagagccttggcgaggacgggggagcgcacactctggagtcggctaagaccaggctctgccgcggtccggaaagccgctgagtttatttgcctgtaaaaggaggatggtaacaggcctcgctgggagggcaccgagcacgggagctgcattgaatcactttcccaactgcacacgtacacggctgctgagactctgagaccgcagggtcagtgggaccatattttaacataaaatgtcgaagtaatttaccttgagaaaagagcagctaaactccagagtggccagagggtgaaaggtagctgtcttttgactaaggaagaagaaatgctatgaaaatcaatcacttctgcctcaatggaagataattttttaaacagaattctttacttttttttaatacaggatctcactttgttggccaggctggaggacagtggtgcaatctcagctcactgcagctttgacctcctgaactcaagccatcctcccaccgcaacttcccgagtagctacaagcacacgccaccacacccagctaatttgttgttgttgtttgtagagatggcctttcaccctgttgcccaggtcgttctcgaactgtgagctcagtcgatccccccactttagcctcccaaagtgctggaatcaccggcatgagccacacgcccagccaaacaaaatgcttctacttgcctctcacccctttacgtaggacagccttgacctgaggtgaactctagagatttcgaacccttgctcattcagcaaaatgccagcaattccaggaataagatatcaggaatgaagctacagcgatgagcatttctatcctaaatactgtttcacttaaccaggccattctctgtcctttatggcagtctggtgaatagtgagaatgtgtcaatggaatataaagtatctaagggccaggcgcagtggctcacatgtgtaatcccaacactttgggaggcccaggcgggcaggtcgcttaaagccaggaattcaagaccagcctggccaacatggtgaaaccccatgtctactaaaaatacgaaaattagccaggcatggtggcacgcgcctatagtcctagctactcaacttgggaggctgaggcaggagaactgcttgaaccctggaggcagaggttgcagtgagccaagaccatgccactgcactccagcctgggtgatagagggagactctgtctcaataaaagaaaaaagaaaaaaaatcataaagtatctagggagatcggaagacaaaaagacagttgttatcatgataatttgattctatcaaaactgaaattttgatacatttgaaaattgtttttctttgcaagattcttcctttatacccctgggacacatgctcacccaaaaaatagcctaccagatcgcctcgggcctggcctacctgcacaagaaaaacatcatcttctgtgacctgaagtcggacaacattctggtgtggtcccttgacgtcaaggagcacatcaacatcaagctatctgactacgggatttcgaggcagtcattccatgagggcgccctaggcgtggagggcactcctggctaccaggccccagagatcaggcctcgcattgtatatgatgagaaggtacgtgcctggatcccctggcccagccccacagtgtaggagcccagccctcaggctagccgggcagtcctggaggcacctgaagcttcggggctcagcatccccaaaagcacatttttctcactctcccttgctcaatgagggaggttctggcttgaaccagaagggtgcaggggcctgtgtctgtctgcttgtagcaaagttgacttctccttagcatcagccttctcagaccttgattcagtaacattgtagaggctgtaaacagcagatgaagagtccaagagagaaacaggtctggatttgggctccaactcacatttagatgtccacagtgaggacacaggaccagccttgcagggcactcaggaggagcagacagaataaggacggtaaagacccttggccttaagtcccggccacagggtgctggccaagttgaatgccaaaccaggagaagagtgaaagagcaagctggcatcccctggcaactgcactgccagcctcagttgagacaatgactaaatgttgatcttctgataacatttatccctgatggctacttggtagatgcaggcacacacacaacttgaagtcatcttaccacgcatgtattacatctagtgccagccttgttaattgatcacccagcattaaaattcccttgtctataatttcttattatctggtgattctacagatggtcattgactaattcctgtaggaatgacctgtgcatgtatggattagctcagcacctgtggttgttgcccatagaaaaggcaaatcagagcaacaaaaataagagcttcataatagtagctgacttcaacaaggaggtcaccttgaaactcagattatcatggaaacattcacattaaaaattctcaagtctatctatctcagtcattctcctgctaaaatgttatttcttgacccttataggggtctgtataaatttttccttgctggacctttttgattatgaaaattagaggagacaacatgttgtgatccaggagacgctcctttttttatgagttgcaatacataacacttttagtaccaagcacattaagctgagggtgtgtgttttcctgccttgtcttggtactcaagaataaggaccatgacatccttggagtccttaatcagtgactaacagcaagttctcagtgtgttttattggatggaaggatggatcgatggatagatggatggatgggacaatgggcaaatggacaatatggtgggaagtcagatggatgggtggatggaaaagaggaaggataggaagacagatggataaatgtgcaggacaggtggtcggatggatagatggatggacagatgagaagaatggataaatgtacaggaagacaagcaaatggatggatgggtggatggatggatggaaagaaggaagggtgagaaaatggatagataaatggatagaagagaaagtggtcagataggtggatggataaatggatagagggacatggtcaggtggtttgttgaatgtttgttttccttgtctaattgtgtctccctggtccctccacctgagggccaccttgtgaaggccactgggcccaggcagcgacctgacttggcttgttctgtgcccaggtagatatgttctcctatggaatggtgctctacgagttgctgtcaggacagcgccctgcactgggccaccaccagctccagattgccaagaagctgtccaagggcatccgcccggttctggggcagccggaggaagtgcagttccggcgactgcaggcgctcatgatggagtgctgggacactaagccagagaaggtacttggggacacagagcccagggcctgggacctcctgccatgtgaggaagctgtgggtccccagggggtgtgtgcctggctgcccaaccatcaccattggcaacccttctctgctcatttcttctagagggtgatgtttgctgctcctaacatacctactttcattgtctttgtgtgtgcgtgtcactcttacgaaacaaacttccttttcctccccgacttttgtgttacttcaccgtgcaaacaaagtatataaacccctttataacaatacagtccctatgcaagaacagagagaatgtgggtgtctctttgtaaagtgatggggaaaaggtttcgttgtgagaatcagggatcatattacagtgttcaggctagttttttgacggtggtgtttttgtgtttttggaagaggctagtggtttcaaagttaaaactcatttattaaatcagacagagctagtttaatgtatggggagtaaacagggtattctttagaagaacgcatgtccttatctgggcatggtgacatggacttatagtcccagccactggggaggctgaggcaggaggatcacttgagcccaggagttttaggctatggtgcgccctgatcgcacctgtgagtaggttctgcactccagcttgggcaatatagtgagatgaagagtgtatgtccttgggcctgggttggaatacccagggttcagctaacctgaccagatgagcttaaattgccgtagccaaaggtgacccagatacctggatgggtttgctcctgacgtctgaagctgtttcagcctcttgtttggatctagtctgaatgaacagaatccctcattcctccctggttggggctggctgatctcatgggcagaacgggcaccaatccggttgtaagtgaccttgctctcttctggtggcttctctccctcagcgaccgctggccctgtcggtggtgagccagatgaaggacccgacttttgccaccttcatgtatgaactgtgctgtgggaagcagacagccttcttctcatcccagggccaggagtacaccgtggtgttttgggatggaaaagaggagtccaggtaagctcctgcgggctgccctgccccctttgtatttggggtgggaggccgccgtggaatctgggaacacagtcgatgttgaccacagtgagaattatttagcagacggtagggtccagaacctggttagactgcactcaagaaagagcagggagagcagaagaaagtccacacaaagagacgtgcatgtatggttttgtggttaagagatgccaaaaatgggtagtatctgccagggtgtctggggacgtgagggcactgtggcatgtgcctacagtcctagccactccagaggctgaggcaggagaatcacctgagcccaggagttcaagtttagcctgaacaacatagcaagaccccatcttttaaaaaattagaaaatttaaaacatttttaaaaacgaaatgaggcctgtcggcctggttatgtgactttctcaagcatgttctgctgccccagattgcagaaggggcaacgggggggggcgtctaaacagagttggggttttgccaaagggagagaggggcagaggcattggggtgttttcaagggagtgatacagagatggaccaaggaacctaagtgaggccacaaattcagggagcacaatgcaaagtactaaaggatcctaggtattgccagagttaaaaaaaaaactcaagagttatggtttcaggtgggatgagccgaaaaactaggaggcggtggccagacaagacgtgcttgccgtggggtgggtgggaggcgcacagtcggtagtaaagacggcatctggagtgtgacctttggggaggatgcctggggtagagtgaggaatgagcttgagacataataagataaacggaacagacttcgcagtttctcttaggtcagtctttgtgagtttgcgtcaggttttatgccactcggactgagggttgtgacacagacgtactctaagaaatgatgctgtaaggaagtttttctgaccaggccttgtggctcatgcctgtaaccccagcactttaggaggctgaggcaggtggatcttttgagttcaggagtttgagaccagtctaggaaacatggtgaaactttgtctctacaaaaataaataaataacaaaaattagctgggaatggtggcgagcacctgtagtccctgctactcaggaggctgaggcaggaggattacttgaacccaggagtttgccactgcagtgggtggtgattgtgccactgcactccagcctgggtgacagagtgagaccctgcctcagaaaaaaagagaagttattccaaaacacagcgatggagcacgccttcctgatgggatgtactctaaggacaaaacaaaaagcaaacatattaattaaacaggtttcagtaattatattgttggcagcactgttatgattgttactctaagatgctgcttgtggttgtggagtcagttaatgagtaattatgttgctgttgctggaaacatgagctaaaggggaaagagatgtaaagtcgggtaagtaaaagcctgcagttctgaatcgattggatagactcgtgacatagttgaaaaataaacacaaatatctcagttctgctcactgaaaaggcctaaaaacaaggaccaaccaaatgccaatatgcacccctaggacccagactgtggtctctaagtaccaaagtgaaccagggctcatcagaatcatggcagagtccaggtccggggcagggagtgcacctggaacatctgccaccctagaagcaaggacatcgtcagacttctgagggtgaattggaggaccttgggccagactggtcctgggaggctgggccgggccctgccctgctggcctagagacacacacgcggcaggtacctgagacagttccgctcagggctctgaagactcatcccagagggaagacagaggcctcttcctgtgacctgtgaaggttctttaaaactcactgcggcctgaagagagactcactcacaggaagggaggagggggctggctgggagcacacgggcagccaagcaggggagccaggatggaaccggacttgacttgagatctgtctgagaattaaggaaggaaaggaggcaggagaggcagggcagacgagcaggtaaacaggatacgcctaggacacaattccagttgcagggaacaggggcaattattctttatgactctctatatttttaactgtttgttttcaaagtaaaagctattcaaatatcttagttttgtttttctgatgcataaaaaaatgatgggaaaaggagacaaatacacctgaaggaagtttttgtttgctgtattttctaccatttctatcatctgcaaatacgttatcagtcaacagctttttaaaatttggtggcaggagaaactttatattgagaactgctatccgcgagcttaacatattctcttgagtctgagggacagagctgcgtgatgcggggtacataacttcccagccccatcagcttcagcctcctctgccatgcagtgagtgctcaggatgcccgccacagcctgaggggagacagcgatgccggggacagccggcctggtgagccaaggctctcgcaaatgacaagccattagttctcagagcactcgtgctgggagcacattttgagtgcccccccgccccaacccaatctcctctggaattctcccaacttgtctttagccctggctttgtctactctacagtgaggagctccccgcataacaggggcgggcaggatatggccggcgggagggcccctccttcgtactgggggcaaccgtctcaaccctgaggggtcacggaaagaggacagcctttcttctctggcgaatgcccttcctgcgggcgacggtcaagcattacccttcgggcagaacccggctctgccctctcagaacacaggatgcaaccctgggtgggagcaggggaggtagacgaggctcgcagctggcaggccaggctcagggaaaggaggcagcccctggcccccgggcactgacagcacagtttctgccacttacaggaactacacggtggtgaacacagagaagggcctcatggaggtgcagaggatgtgctgccctgggatgaaggtgagctgccagctccaggtccagagatccctgtggacagccaccgaggtaagcactgcccgcaggcctgcccaccgaggtaagcactgcccactgggtgcagccctgggtgggggccacattcataaaaatacaggacgccaggtcaagtgaactttcagataacccccagcgcatccccgtgcagtccccaagtaatgccaggagccccgagaagtagcagcctgtcaccaggggcagctcaaccctgcctgctgctggctggaggccgggatttgcgatggtgaggaccagatgtagaccctcagcaggagacgagacccaggaggctagggacgtgcctgtgtttcccataacactgctagtcactcagctctgaaggcctcttgccttcacatcagggaaatcagggaagtcactagaaggcccaaggaggggtcttctgagaagtcccgagacaactggccaaacacaaatgttctgaggcaggctaggcacaggggctcacgcctgtaatcccagcactttgggaggccaagataggaggatcacgaggtcaagagattgagaccatcctggccaacatagtgaaaccccgtctctactaaaaaatacaaaaattagctgggcatggtggtgcgtgagtgttcccagctactcaggaggctgaggcaggagaatcggttgaacccaggaggtggaggttgcaatgagccaagatcgcaccattgcactccagccttgcgtaccacttaagcctcagaaatctcagtgttaagaaacatctgacaacagattagccgaagtaggtgcagcccagtcccaggcatccaagagatgctcccacaacatttcctcctagaatgggcgagagcaagggctctgcctaaagcgtgctgttgcatgggaagaacagtgaacatttcctcctagagtgaggaaagcaagggctctgcctaaagcatgctgtctcacatgggaagaacagtgagaagacagcattgcggcgtgagtccactttgccagtaccaggtgcacacacaaataccacagagaacttctgagaggctgtgcccccagatcccaatgttggttttctctggggaatagatgacgggctattttctgtttcctctttagactagtctgtctttttcaacgtttctacaaagagcagaaatccataaacaacccaccagaacgtgtcaatccatgtaactttccaagacccataggggatccccaagtccaagtgcatcctcatgggaatggcttgggaaatgccagacactttccagcctgggtctcacagtggacctgtctgcctctgcaggaccagaaaatctacatctacaccctcaagggcatgtgccccttaaacacaccccaacaggccttggatactccagctgtcgtcacctgcttcttggccgtgcctgttattaaaaaggtgaggtcggggcaaaggcaggtatgcaggtctctgatgcacttccacgcctaggaggcgtctcctagctatgtcagggtggcgcctgcagagccacacctaggaccacctggcctaggacgtagacttagagacggtgggaggaaagatatcagacctggtccgtcattagtgccttccggtttgcaaaaacctaagtcaagtccccagccagactgcaggccgaatgaaaaaccccctttcacatgcaaatgccctgactcaggtggaaggactgttggtacaaatggcacggtgagcagtcatgcgtgtgcccttcccctatccggagcctcttccccacctgcccaggccagagccacctcacagccacttgatcaccaggtcctggaggtcctgatctccctccctccatctctgcctcccgccaagtactcgccgtcttacaccagacgcagtttctctttgtgcagcatagccctgcagactcagctctttaacctcctagccctggcctttctaaatgagaccccaaggggcactctccccattaaaggcccagccagctgtgctgcaccttgggattagccccagcctctatgaggctggcctccagtccctgctgggcccggcaccctccccacaaagcaccccactctgtgctgggcccttgacatcccagcctcctccaggaacagcccctccacgcacctcttcccagacggcctccgattcagttctcaagacccggggccttgtcccctcctttgagaagctgcccctcagtggggggcagctccctggcttttccgggctcctccgcccacaggattcaggcacggctcagccagctctggtttcatccaccctgaggggcctgtctgtgcataggcgccctcactaaatgcacaagaagcctttactggtgttgctttgttaaaatgtgactgtcatcatccaattccagtttgcccatctacaaaacaggtataagaagagacagaaggcctagcatacccaaaggtctaggccggtgtgcttggtaaatgagtattattattacttctggatggtcgcaaaatacatgaactcttctcttcacccttcttcagtttcatttaaaaaaaaaaaaaacaggtatgaaatgaaccttagagtcatttatgaccatggccccacagcgaggctacgcagcttgggaccaggcccgtaccagagcgcaggagaacacgacacaaagtgttattgaggccaccgctggcgagagcccccagccagggcaccacctcctgcacgaccagagggaataaagcctgctctgtgcagggcctcctgggcagggtgtctgccccctccaaggccgccagcgcgaagcctgcattcttgcacgcgcacccacgttcacacccagccgggacgtggcactcaccgccctggccggggcctgagccaggactgcagatagagacctggagcctgtttgccttggctgccttctttccctaaagtcctggggatggatttcgatacgctttcttagagcatgttgtcctggacagtgagctacgggtctccactccattgccctgcacagccagcctcctgagctcccccagctccccacaaggaggctttctgccctgccccctcactggcatgaggcccagctccctgctctgccctgactccagctttgttctgcagacctcttcccacccccaccacagccgacgcggtgtctaggctgcggagctgcactctgttcctggctctgccctgggaggtgccccggggcggtctggggtgggcccagcattcagcaaggtccctgcaactttggcctctgcccggtgacctctggcgggtgtagaagagctcatgcttcattgagggggtggggggcaccctgaggaccctgtcaacgtcagctgaaccacaggcatctcgatagatgtaagctgggatgagggctcagcaggctgagacaggcctccagaagagggttgagtaggaagcgatttcttccagaattagttcagcaaacacatgtcatccacttggagcaggagccaggtggagtcacagggccaccaagatgaaggagactgagcccttccctgtgccaggctagtgccacggggatgctggtgggctgggagcccatccttatggaacactctgcctggtggggggggtggcaggcagggggcagtgcacagatgcttgccatgcccccactgctgtcatgttaagcagcaccgagaaaagggcgggggcaccaggtcctgcctctgaaggaggccttggtggcctcaaggagaaggcagctccctgctgctcgccctgcaagaagctggcagaagcagaggcagcccatgtggtccaggtgacacgcagccttacttggtgccacaggccctgcctctgggtggcacattcctttctttgctgcagggatggtagatatggctctgcggagtcagagctgcacttctttaggagtagccccggcctttctaagagatttgctgccctgaggcgcactggtggaaagtgactgcccgcctggtgtgggtgcagatgagtccagtgcctactctgtgtctctcttggaatgtgtgaaatggaaggatgtgacacatccctgtctccttccttcagaattcctacctggtcttagcgggcctcgccgatgggcttgtggctgtgtttcccgtggtgcggggcaccccaaaggacagctgctcctacctgtgctcacacacagccaacaggtccaagttcagcatcgcggatgaagacgcacggcagaacccctacccagtgaaggccatggaggtggtcaacagcggctctgaggtctggtacagcaatgggccgggcctccttgtcatcgactgtgcctccctggagatctgcaggcggctggagccctacatggccccctccatggttacgtcagtcgtgtgcagctctgagggcagaggggaggaggtcgtctggtgcctggatgacaaggccaactccttggtgatgtaccactccaccacctaccagctgtgtgcccggtacttctgcggggtccccagccccctcagggacatgtttcccgtgcggcccttggacacggaacccccggcagccagccacacggccaacccaaaggtgcctgagggggactccatcgcggacgtgagcatcatgtacagtgaggagctgggcacgcagatcctgatccaccaggaatcactcactgactactgctccatgtcctcctactcctcatccccaccccgccaggctgccaggtccccctcaagcctccccagctccccagcaagttcttccagtgtgcctttctccaccgactgcgaggactcagacatgctacatacgcccggtgctgcctccgacaggtctgagcatgacctgacccccatggacggggagaccttcagccagcacctgcaggccgtgaagatcctcgccgtcagagacctcatttgggtccccaggtacgtttcccgaggtgagggcaccatccagggcacgcccactgctcctgctctggggacagagcaaggggaagccccctggcttccttacaggtcatgtggggaggcaggtgctgttcttccaagagggttggtttcctccattgggaatggaagcgatcgctttagcaaatctaagagtggccgcacaaaagcttattgcctgccagagagcttaaggtgccacacaaggaaagccacagtcaactgtgactcagtttccactgagaaaattctcctctgctttgaagtctgtcccctccccataacttaatcccttagcagaaactgcatgtctgttgcctccctcccgcacctttctgcacaccggcttcactccccggagagcacggctaccgacaaatcgcttccccttctgggttttggttgcttaggcgcggtggagatgttatcgtcattggcctggagaaggattctggcgcccagcggggccgagtcattgccgtcttaaaagcccgagagctgactccgcatgggtaagactgagtggcagctcctttaggacccaggcagcagcatgagcacagaaggccctgcagccaggtcctgcacagtggctttgctgcccttccattctcccaaatagcatagccactaacgtggctgtaaggcaaagtggaaacaagatggggcccctcagacagctcctaggggctccgcactggccatggctgcctgtttctggagtacccagtgcacctgtagatcaagtaccctacctagtaccctacctaacgaatgtctccagggccagagttcagctgcaatcgacatgcagatgcatccaggtcattgattcactgttcttcctgccaagcaggaaaccctacccgaggtgtccaccagcccacacagcaccctatggggacagatgacacaggcacaccttgtcatctccaagcctggggtctcagctcctgcccttcctgggctgagacatagctcagtacctgtctgtgggtggggacccccaggattatgccagtctcctctgtgaaggtatgctgggcagggtggcctgtccgggacatggtctacatggttgcagtgatgtgaggctggcgccagctgcagctccccacagtgtttacaccccgcactttgactaccgagccccacacggtaaatctcccctacgaaaagtcctcagttcaaatgtgtgtgtgtgtgtgtgtgtgtgtgtgtgtgtgtgtgtgtgtactttggagctcttccatttcacactaggcctgtttccctgcagcatgagttatcccccatccctgggcaagtgggtttttatttcatctggagcataagagggtggagaaacaccagtcagcttgcttctcccaaagcaggacaatgacaaggacatccttggcagtcgcactcccttgcctgccagctttgaacttttgcagtgagtcctgggccagtgacccttactctgtaagtggttctggaagcaagatctggatctgctcctgagctctggcagagcctgtgggtagaagccttgaactgatggagttcccagcttgcaggtcgggcttctggaggaaatgggtgtgcagcacccaggttaggaccttggcatacctgccattaatgtcctaacgtttagctgttgtttttctcctattcatccctaaagccagattttacctctttctcgctagagggaggctcctcccctaaggggaggtcctggcaaggccacgcggagtgagaggtccctggacatcccagtttgcaggagcacctcagtgccacgcaggccgcacacacgggacacagagggaggaaaggcaattagtatgtgcttggggtggggcaccaccagggcagggaggccacactgtggcccaaaaggaaacctgtagcacacacccaccgatcctgcaaaactgtccacagtttcaaaaaatgtatatagtgatgactttggggcagtaggttttccatttaatatatgatcctgtatttcctaagcctgtagaaacagaatgagagaagaatcttactgagcttagtggcaagggagttgagttaaactcggtcatgagccattcacaagcagaaatttgggtcagtggtgttttctggacgctttgggagctgagtcaaggatgcatgatctgattgcctctgtggccttccagggagtctgactcttacagacaaagcccatggacgcgaactcatgcccacagcccgtctttggactttataaagcctaagcccacaggctggccactggggagaagtggtgcatctcagcacaccccagagagggctggcaagcagacacactcccctgcccttagccagctccgccttcctcagaaggcacagggggagggtcccaaccccacccgagtgggaacccctgtgagtttcctcagacccccttctctctgcagggtgctggtggatgctgccgtggtggcaaaggacactgttgtgtgcacctttgaaaatgaaaacacagagtggtgcctggccgtctggaggggctggggcgccagggagttcgacattttctaccagtcctacgaggagctgggccggctggaggcttgcactcgcaagagaaggtaattcctgtggaatgactgtcacacatcagagctggctggcccggggctgcagcctgacccctctgccatcggcctctagttctccaaggacctagaagacagatggagttctcccctgaactccttgctgctaagaagtgctgagaagttactcgcctggcggtggctccagggttctctggttctctggagcagagttctctgaataccccatcccccaactgctgattttacagccccagggaagacagtggtatcaggctgggagcggcctcctctggcctcccccatcagtttgcaggagcaggggtgcaggatcctgttctgagctgggtcaaacaaagcagggccgggccttcctgccatccccaggtctcagatggaattacactagaggccctccgctgggaagcacttgaggtagggcaggaggggggctgtgacccctgccctttccccgccagagacctcaggctctcagcacattccacaggctcctgagtccccgaggcctgggccagcttgggcaagccaagatcagatgtctctgtgttcgggaaggtctccgtgtgggaaagcccttgggggatcccgggtgaggagtgttgccccatccagagaatgaatgagttcctttaagtgccaccgccagcaagcccagaggcacacagtccgagtgcacccgcttagcctttacattcctctccaccgacaaaaggaaggggaaactcaatcagcaggacttcagaaagggccttgtgtttatagctttgtcaagtaaatttggacgcagctggagcacaggccctgtttgtttgcacataataatcttgtttatcactttaaaaaattcagtaatatctcagcagtcaggcttctggttgtgaaatcacattgtatgggatttataccaaattatgtatttgctaaacattcactgcacacgtgtacagcggagtacgaaaaggaacgttgtccacaggggatttatggatacaacagcaaacattttataaactatgcacatgcattacacacatgcacacacatatgcacacacatgtgcaaacatagccacttttttgtcaagagttaccctttggggctccttaaaccagaatgggagtttgaaagagagatcatactccagctgaagtttgttgacccttttctaaaattaaaaagatcaaatttagtatttgctggatatgcagggagatgagactcttttaatctcaaaataaacagattctttcaagaacgaagctgtggcctctgtcttttgagcgcttatgaccacagcacgggctcagtccctcccagacccactcgctgtctggggataatgggcagcccctccttgcccactgtgccaacatgcaggtggcccctgagcagcttccatgggtggagacgctgctctgtcagtcacaggcttggaaaaagcgagtccccccactcttttttttttttttttttttttttttaccaacctgggcaccaagtcccagggggctgagggtctgtgcttcctgtctacctccctgccattctctcaccctcatcccacagcagggtctcaggagtcccactctccctctcctctcattccagtgccccacaactgcccagttaacccccagatgcaagccagattccatctgccccaggccccaagcttttgctttggcatcacgcgaggccaggctgctttgcaggcaccaaaattcaccctctcctactcctggaaaagcccagccccaggcctcacagagccaggggaggggatctcatcacatcacagttagaaatcatacaggcctaaagtcccagctacccaggagccaaggcaggaggaacccttgagcctgggagttggaggttacagtgagctatgatcacaccagctttctagcctgggtgacagagcaagacccaactcttaaaaaaaaaaaaaaaatacaggaaatgactaatgaacttgactccatgaaattgaaacttacgtggaaaattagtccaaagcctaaaagactagcaactgagaaaaaaaaacattgcaacacaaatgagagacaaagacctcacttatcttcattacagagagttcgtaatgtcaataagaaacagaaaaccggaaaggcaaacaggttaagggcatgggcagcaattgaattacaaagaaacagacagacccttaaacatcaatgcttgacctcacccaacagcagggaaacagtctccacaacagtaaaatgttgctgggatgggcccagcattcagcatggtccctgcaactttggcctctgcccagtgacctctggcgggtgtagaagagctcatgcttcagtgagggggtggggggcaccctgaggaccctgtcaacatcagctggaccacaggcatctcagatagatgtcacttaccaccctcatgttggcagagggtggtaaccagccagcatctccttcttaaacacctactaagtgtcaggcactgtgaccggagacacagtcaagaatctctgtgttttttttgttttgttttgtttttgttttttgagacggagtctcgctctgttgcccaggctggagtgcaatggcgcgatctcagctcactgccacctccgcctcccaggttcaagcaattctcctgcctcagcctcccgagtagctgcgattacaggcgtgcaccacaatgcctggataatttttgtattttcagtagaaacggggtttcaccatgttggccaggatggtcttgaactcctgagctcaggtgatccgcccgcctcatcctcccaaagtgctgggattacaggtgtgagctacctgcgctggccgaatctctgcttttaggagctcactcctcataggtagagttgacaataagcacacaaacaagtgagatagcagggcagccggaccacccagttgggcaattcgtggcttggcctaggaacgttacatttgactgaggctggcgaggcctgcagcctgcaccaggaggtacaatgtgagactgaggaatgggaagaaggcattccatggagctctgagggcactgggtgcaagggccttgcacatgcaaagaccctgttgtgggttcaagccactgtgtgggagggacaggagagcctggcgtggctgcggccttgaaggaggggactgtgcacacagaattgcaagtgggggtctccgcggaagctcctggcagttttaagcaggattattagatgattcagtcaactttacaactcactttgctgaatggagggtggattaacgagggggtagttggaggctaccccttggagggcattctggacttatctaccaaaatttcaaatgcacataccctctgacccagcagttccacttaagtatttggtcctgaaatcttggtaaaagtgcccaaagatacagaacaaggatgttcactatagcatctcttagaatatggccccaaacaggaagcaaccccaacctctatcatgagggaggtcataaaattcctgcacatgcaacagtgccatcctctgcagcctgtcaaagaggcaggcagcactaactgctggactggaatgttctccaagatataataaatgcatttgtttgaaagcagcttgcagcacagtgcgtcaggcctctgagcccaagccaagccatcgcatcccctgtgacttgcacgtatatgcctagatggcctgaagtaactgaagaatcacaaaagaagtgaatatgccctgccccgccttaactgatgacattccaccacaaaagaagtgaaaaaggccggtccttgacttaactgatgacattatcttatgaaattccttctcctggctcatcctggctcaaaaagctcccccactgagcacgttgccacccccactcctgcccgccagagaacaaaccccctttttcctttacctacccaaatcttataaaacggcctcacgcctatctcccttcactgactcccttttcggactcagcccacctgcgcccaggtgaaataaacagccttgttgctcacacaaagcctgtttggtggtctcttcacatggacgtgcattaaatttggtgccgtaactggcgcggggggaggggggggggaacctcccttgggagatcaatcccctgtcctcctgctctttggtccatgagaaagatccacctacaacctcaagtcctcagaccaaccagcccaagaaacatctcaccaatttcaaatccagtaagcagcctctttttactctcttctccaacctccctcactatccctcaacctctttctcctttcaatcttggcgccacacttcaatttctcccttctcttaacttcaattcctttcattttctggtagagataaaggagacacgttttatccgtggacccaaaactccagcgccggtcacggactgggaaggcagccttcccttggtgtttaatcattgcagggacacctctctgattattcacccaggtttcagaggtgtcagaccacgcagggacgcctgccttggtccttcacccttagcggcaagtcccgcttttctggggaatgggcaaggaccccaaccccttctctccgtgtctctaccccttctccgcctttctggggggcaagaaacccccaaccccttctccttcaccctgagcggcaagtcccgcttttctagaggaggagcaagtactccaacctcatatctctgcgccccaatcccttatttctgtgccccaacctcttatctctgtgccccaatcccttatttccatgcccccacctcttatatctctgcaccttgatcccttatttccacatcccgacctcgtatctctgcaccccgacccctttcccacttttctggagagtaagaacccctgaaccgcttctctccgtgtctctactctcccttttctttaaacttgcctccttcactgtaggcaaccttccactctccattcctccttcttctcccttagcctatgttctcaaaaacttaaaacctcttcaactcacacctgacctaaaacctaaatgccttattttcttctgcaatgccgcttgaccccaatacaaactcaacagtagttccaaatagccggaaaacagcactttcaatttttccatcctgcaagatctaaataattcttgtcgtaaaatgggcaaatggtctgaggtgcctgacgtccaggcgttcttttacacatcagtccctccctagtctctgttcccagtgcaactcatcccaaatcttccttctttccctcccgcctgtctcctcagtcccaaccccaagcatcgctgagtctttctaatcttttctatagacccatctgacctctcccctcctccccaggctgctccttgccaggccgagctaggtcccaattcttcctcagcctccgctcctccaccatataatctttttatcacctcccctcctcacacccggtccggcttacagtttccttccgtgactagccctcccctacctgcccagcaattttctcttaaaaaggtggctggagctaaaggcatagtcaaggttaatgctcctttttctttatcccaaatcagatagcgtttaggctctttttcatcaaatataaaaacccagcccagttcatgcctcgtttggcagcaaccctgagacactttacggccctagaccctaaaagcccaaaaggccgtcttattctcaatatatattttatcacccaatctgctccctacattaaataaaactccaaaaattaaattccggccctcaaaccccacaacaggatttaattaaccttgccttcaaggtgtacaataatagaaaaaagttgcaattccttgcctccactgtgagacaaaccccagccacatctccagcacacaagaacttccaaacacctgaactgcagcggccaggcattcctccagaacctcctcccccaggagcttgctacaagtgccagaaatctggccaccaggccaaggaatgcctgcagcccaggattcctcctaagccgtgtcccatctgtgcgggaccccactggaaatcggactgtccaactcacctggcagccactcccagagcccctggaactccggcccaaggctctctgactgactccttcccagatcttcttggcttagcggctgaagactgacactgcccgatcacctcggaagccccctagaccatcacggacgccgagctgccagtaactctcacagtggaaggtaaacccgtccccttcttaatcaatacggaggctacccactccacattaccttcttttcaagggcctgtttcccttacctccataactgttgtgcgtattgacagccaggcttctaaacctcttaaaactccccaactctggtgccaacttagacaatactcttttaagcactccttttagttatccccagctgcccagttcccttattaggctgagacactttaactaaattatctgcttccctgactattcctgggctacagccacacctcattactgcccttcttcccaatccaaagcctcctttgtgtcctcctcttgtatcccccgaccttaacccataagtataagatacctctactccctccttggtgaccgatcatgcaccccttaccatctcatcgaaacctaatcacccttaccccgctcaacaccaatatcccatcccacagcatgctttgaaaagactaaagcctgttatcactctcctgctacagcatggccttttaaagcctataaactctccttacaattcccccatttcacttgtcctaaaaccagacaagccttacaagttagttcaggatctgtgccttatcaaccacattgttttgcctatccaccccatggtgtcaaacccatatactctcctatcctcaatacctcactccataatccattattgtgttctggatctcaaacatgctttctttactattcctttgcacccttcatcccagcctctcttcactttcacttggactgaccctgacacccatcaggctcagcaaattacctgggctgtactgccccaaagcttcacagacagcccccattacatcagtcaagcccaaattttttccctatctgttacctatctcagcataattctcataaagacacacgtgctctccctgccgatcatgtccgattaatctcccaaaccccaaccccttctacaaaacaagaactcctttccttcctaggcatggttagtgcagtcagaattcttacacaagagccaggaccgcaccctgtagaccttctgtccaaacaacttgaccttactgttttagcctagccctcatgtctctgtgcagcggctgctgccaccctaatacttttagaggccctcaaaatcacaaactatgctcaactcactctctacagttatcataacttccaaaatctattttcttcctcatacctgacatatatactttctgctccccggctccttcagctgtactcactctttattgagtctcccacaattaccatttttcctggcaccgacttcaatccagcctcccacattattcctgataccacacctgacccccatgactgcatctctctgatccacctgacgttcaccccatttccccacatttccttcttccctgcttctcaccctgatcacacttggtttatggatggcagttccaccaggcctaatggccacacaccagcaaaggcaggctgtgctatagtacaagccgctagcccgcctcttagaacctctcatttcctttccatcgtggaaatctatcctcaaggaaataacttctcagtgttccatctgctattctactgctcctcagggattattcaggccccctcccttccctacacatcaagctcagggatttgcctccacccaggactggcaaattgactttactcaacatgccccgagtcagataactaaaatacctcttattctaggtagacactttcactggataggtagaggcctttcctacagggtctgagaaggccaccatggtcatttcttcccttctgtcaaacataattcctcggtttggccttcccacctctatactgtctgataacagaccagcctttattagtcaaatcagccaagcgttttttcaggctcttagtattcagtgaaacctttatatcccttacagtcctcagccttcaggaaaggtagaacggactaatgatcttttaaaaacacacctcaccaagctcagccaccaacttaaaaaagactggacaatacttttaccactttcccttctcagaattcaggcctgtccttggaatgctacaaggtacagcccatttgagctcctgtatagacgctcctttttattaggccccagtctcattccagacaccagaccaacttggactgtgccccaaaaaacttgtcatccctactatcttctgtctagtcgtactcctattcaccattctcaactactcatacgtgccctgctcttgtttacactgccagtttacactgtttctccaagccatcacagctgatatctcctggtgctatccccaaaccgccactctgaactcttaaatacataatctttgctggcaggactatgctgaacctcctttggcactctctaatcagatgtcctgagtcatctcaattcttagaccttttatacctgtttttctcctttacttattccgtttagtttttcaattcatacaaaaccgtatccaggtcatcaccaataattctaaatgacgaatgtttcttctaacaaccgcacaatatcaccccttaccacaagacctcccttcagcttaatctctcccactctaggttcccacgccgccccgaatcccgctcgaagcagccctgagaaacatcgcccattctctctctccacaccgccccccaaaaattttcgctgccccaacacttcgacactattttgttttatttttcttattaatataagaaggcaggaatgtcaggcctctgagcccaagctaagccatcgcatcccctgtgacctgcacgcatatataagcccagatggcctgaagtaactgaagaatcacaaaagaagtgaatatgccctgccccaccttaactgatgacattccaccacaaaagaagtgtaaatggctggttcttgccttaagtgatgacattaccttgtgaaagtccttttcctggctcatcctggctcaaaaagcacccccactgagcaccttgccgcccccactcctgcccgccagagaacaaaccccctttgactgtaattttcctttacctacccaaatcctataaaacggccccacccccatctccctgcactgactctcttttcggactcagcccgcctgcacccaggtgaaataaacagctttattgctcacacaaa

SEQ ID NO: 35 - DNA, 23795 bp, synthetic construct
  source 1..23795: mol_type = other DNA
gcgttcattttcagcctggtgtggggtgagtggtacccaacgggccggggcgccgcgtccgcaggaagaggcgcggggtgcaggtcagcgccagcgggggcgcggcgcatgtgtgggccgtggcgctgggcggcgtgggggtgctggacggtgtccctgtgctggacggtgtcccgctggctcagaaccggcgcggggcctgggtcggggccgccctcgcttccggcctcccagtcgggccctgtcgctggcgttggatttgactgaccgccagcgtggtggcaacgctgaagcgtccagaatcttctgcctaacctctcgccggcatggaactggctagccgttttattaaactctgttttgcgtggacggtaaaccctccagataatctgtaaataggctaaaaaaaattcggaacctcgttgagctgctgtcgttggcagtgagaactccgcgcagagagacagatgtagttgggttgacttcagtgaggggatttccatctttctcagtcattaaaaaaagtgttcagacatttaacactgttgacccccacacacaattttttagtacagttataactaagaaaacaaaaatcccctccaaaaaattacaagttaattgcgaaagaccacatttaaatttttgcccatgaaattcagtttagtcgtttctctgaaacagtgcttcaaaaaagactgtttccccgcattgtgtgaaatgcaggagacccacgtacttgtatttttaaaaaacccatttgcaacatactattaaagttggatttaagagaacatggtagaagaaaatctaagcaatactacaccttttagcaccctcattatgttttcatctcagagcaattaaaactgctatacaaatcaacgttaagataactaaactgctgcttttttcgtattcagttgtctatgaaaaccgtttccctaggaagtacttactctgcttgaaaatgctcctaaactttaaattttggggtatctcagggttgcaatgaaagttttttgaaatctttttttttttttttttttaaggcttgtaaacatataacataaaaatggcttccaaaagagctctggtcatcctggctaaaggagcagaggaaatggagacggtcatccctgtagatgtcatgaggcgagctggggtaagtcccacatcgatttttagccattcctgttttaaatgtttttggatttttaaatcattttgaataaaatattcaaagtgctctatgaaatatttcaaatatacacaaaatttcagagatgacataagaataaatacctgttgatccactgctcacatttaacgcttgttaatgtcttgccatatttccttcagacccatttctcttttgttttgagctctgtcgtccaggctggagtgcgatggcaggatcttggctcatttcggtctctgcctcctgggcccaaaccatcttcccacctcagcctcccaaatagctgagactacagatgcgtgccaccacacctggctaatttttgtatgttttgtagagacagggttttgccatgttgcccaggctgctctccaactcctgagctcaagttgtccacccgcctcaggcctcccaaagtgttaggactacaggcgtgagccactgcactgtccttagacccatttcttttttcttctttttttttttttttgagatggtgtctctctgtgtcgctcagcctggaacgcagtggtgtgatctctgctcgctgcaacctctgcctcccgggttcaagagattctcctgcctcaccctcagctgggattacaggtgtccgccaccacgcccggctaattgtatttttagtacagatggggtttcaccatgttggccaggttggtctcgaactcctggcttcaagtgacccgcccgccttagccttttacagtgctgggattacaggcaggagccaccatgcccggcccctcagactcgtttcttaaagagcagatgcttcaaagaaatacatttgaagccccctttgtaaatttctccaatcctatgccccttcttccttccttaaagataagtgctatcctcgcactcttgtgtatccatgcatgtgtgtctttttttttttttttaagacagagtcttgctctgtcacccaggctggagtgcagtggtgtgacctcagctcactgcaacttctgcctcctgggttcaagcagttctctgcctcagcctcccaagtagctgggattacaggtgcgcaccaccatgcctggctaattttttgtatttttagtagatggggtttcaccatcttggccaggctggtcttgaactcttgacctcgtgatccacccacctcggcctcccaaagtgctgtgattacagatgtgagctactgcacccgcccccacgcatgtctttaaggtagcatttgaccgtggttctcattttgcgtgtttatatattatctctctctatctaaaaatagtgaacagtgaagtgaagtagaactaactctgtgccaggcagcattctaagtgccgataaaccttacaacaatgtcgtgagttagatatcaccatcctcattttacagttgaagaaactgaggcacagagacataaataatgtacccacatcacgtagtaagtacaaaagccagaactcagacccaggcagcctggccccagagtctgttaaccctatactcctctggttctcagaaatgaagatacatgtcgattaagtttatccacttaaaattgctgcttggtgttgcactgaatgccacaatctacccattcctctaattacagcattacaattctgtaatacgtattcttgtgtaggtttctttgtgcaaatgtgaggaaatttttccaggttatatatctaaaagtagaatgactaggccgaaggatagcctgtagtcagcatgactaggttttgccaagttgctctccagtgtcccagtttgtagtcccaccagcagtgtaggaaaattcccactttcccagtgccagctcttggtattgttgactttaaaaatttttgaaagataaagcagtatttcgttgtttggacttgcatttctattttacaaaaataccatgaggtttaaatggcaacagtaaacttgcaagatgagttattaataggatgatcatataactggtcacccaaaccagaacatttgtgggagaaagggtgttccagtcccacagagtacagggcagcagctataagtagggtctgtcccgggcaaaccagggtagacctagttattaaatatatttagccagtgtattagcttaaatttggtatagttgtggtgcagtatttcctgtcatgttactttcaaacacagggcagctgtgtaaacgttactctagctgggtgtggtggctcatgtctgtaatcccagctacttgggaggctgaagcaggaggatcatttgagcccaggagctggaggctgcagtaagctatgattgtgtcactgccctctagcccaggtgacagggtgagaccccatctctcttttttctttttttttaaagacagtgttactctgaatttatgtttcagtgttcttaaatatgataacatctttctcgtagattaaggtcaccgttgcaggcctggctggaaaagacccagtacagtgtagccgtgatgtggtcatttgtcctgatgccagccttgaagatgcaaaaaaagaggtttgtaatccatacatggagttattccttcatatggcttctttgtttcttgaaatgtcttaagagtgttgttagcacagactcattttagaaaattattttgcttgaatgtcttcccctgacagattaagagggtgaggactttgtctttctattctgtatctgtagaatgtggcaattgcttgatacagaatgtgcttagtaagtgggtggctggatgggtaggtggccggttggatgtgtggccagatgggtgggttggtgcttagatggatggctgcattgttttcccatcagtatttttctggcttacacaggcatccttgcctcctattacacatttttacctgacataaatcaactgccacattttccattttttattattattatttttgtttagaggaatggtcccactctctcccctaggctggagtccagtggtgcagtcacagctcactgcagcctcaacctcccaggttcaagcaatcctcccacctcaaccccccacgtagctcggactacaggcatgtgccatgcccggccattattttttctaaagatactttcagagttccactgtagttgtgttgttttttcagtatcgttggaattatggctcttacctttaaggacgatggacacttttggaagctagcatccctttcctcagaaacatgctcccccacaggcgcttttgcacactccgtcgtgcggtcagcgtgacaggagtgtggactgtaccctctgacagcagggtcatggcaggaaaggaggcagagtcggctcacagatggctggttgcacactgctgaggaacctggagtgcggttccctgggccgagctgtcctcagatacataggaaaaagtttaatcctttctaataagtttagatttttcattactggattgtagaaaattagactgttggtatttacatgtgatttgttgaaacaaattaaaaatgacaagcagaagtaagtattccaggccaagtgcagtggctcacctgtaatcccagcacttttggaggccaaagtgggaggatcacttgggaccaggagtttgagaccagcctgggcaacatagcgagaccgtttctctttaaattaaaaatttgtaaaagccaggtgtggtggtgcatgcctgtagttctagctacttaagaggctgaggcaagaggatcacttgagcctagacggttgcttgagcccaggaatttgagacagcagtgaactgtgattgtgccattgcccttcagcctgggtgacagagcgagaccctgtctcaaaaataataataatactttttttcatctctgtttgtgtttttgtcatatgatgtctgggcattttaaaacagtggttacctttattttcaatcgacagataataagtgtacatattcatgggatttgtgatgtttccatgcataatatatagtgatcggatcagagtaattagcatatccatcatctcaaacatttctttgtgttgggaacgttcaatatcctccttgctatttgaaactatatatgattgttaactatagtcattctacgggggtatagaacaccagaacctattcctcctatctagctataattttgtatcttttaacaaatctctccctatccccactttctcctatcctccccagcctctagtatcctctgtcctacattatgcttctatgtgatcaatttttttttagctttcacatatgagtgagaacatggagtgtttaatttgctattcctggcttctttcacttaatataatgttctctagttccattcttgtagccacaaatgacaagatttcattcttttttatggctggatagtatcccattgtgtataaatgccacattttctttatgcattcatctgttgttggacctaggttgatttcgtatgttggctagtgtgactgttggtgtagtaaacaagggagtgcaggtgtctcttcagtatactgatttcctttccattggatacatgccaagtagtgggattgctggaccatatggtagttccatttactgtagttttttaaggaagtggttaccttttgtgtgtttttatttttcagtgcagattctaaaaggagtaaaataaattctatactttacacattttcttttgagttttgagctttgcttggttttgaatcaacggtaggatgtttatggtcttaaaagtgattctaagccagccatagtggttcacacctgaaatcctagcactttgtgaggctgaggcaggaggattacctgagcccaggagttttgagactagcctgggcaatgaagcgagaccctgtctctacaaaaataaaaaaaattagctggctgtggtggtgcatgcctgtagtcctagctcctgcagaggctgaagtgggagagttgcttgagcccaggagttcaaggctgtagtgagccacgattgcatcactgcactctagcctgggtgacagaggtgagggcttctctctaaaaaaattttataggttgcactaaatacataatacatttttattttgtaatttgtttaatgactagattttttttaaccactttttaaagtactaaagtattgttggccggccacagtggttcacgcctgtaatcccagcactttgggaggccgagatgggtgtatcacgaggtcaggagtttgagaccagcctggtcaagagggtgaaaccccatctttactaaaaatacacagattagccgggcacagtggtgggtacctgtaatcccagttgcttgggaggctgaggcaggagaatcgcttgaatccgggagacggaagttgcagtgagctgagatcactgcactctaacctgggtgacagagcaagactctgtctcaaaaaaaaaaaaaaaagaaaagaaaaataaataaataaataaaaagtcctaaagtattgttaaaacaatttccgttttgtaatttcaggaagtttgaaattaatttgatttctaggattttttgggggggatactaaaattctccccccgttacatttttcataaagttaagaaaaattttttgtgccttttacttaaaatttgtttctctattaattttatttgtttttttagacagagtcttgctctgttgcccaggctagagtgcggtggtgcagcctcagctcactgcagcctctgcctcctaggttcaagcgattctcctgcctcaaccccccaagtagatgggaccacaggtgtgcaccaccacacccagctaattttcatatttttagtagaaatgggggttttgccatgttggccaggctggtctcgaactcctgagctcaggtaatcttcctgccttggcctcccaaagtgctgggattacagacatgagccagtgtgcccagcctgtttttctattaattttttaagttgttcatgtacattcttgttgaacaataattcaaacaatatagacacatataaagtcaaaatgttaaatgtcctgttctcattctccctctgccccatcccacactactcccattagcaactagagtgtcttcctttgtctgtgactacctgtatacagaatatgtggggtggggtgcttgtggtgattgtacacatacacgcatacatctacacacaaatacatatatccttgtcttttacaggaaggagattatactacccctgctactctgcagcgtggacatccttgcatgtcactacatacaggttttctgcattttttgctagttaaaacaccattccgtcatgtggatacaccttaatttatttaactgttctattggcagataggctatctcctgtacttcccacatttaaaataggaaagtattattggactgtcaatttaatgcacagttgaaatgaaatgtttttgttttctttatgttttaaactgttacagggaccatatgatgtggtggttctaccaggaggtaatctgggcgcacagaatttatctgaggtaaaaaattctactcaattatacctcaataaagctggggggggggaaaaactaaagaatttcagcatctgcttatgttctgttaattttgttattattcaaatatttcgggaggaggctgtgaaaaaaaaatagaaacaactaaaattaacaaaatggtgttatagcattaactcaaacttttttttttttttgagacagagtcttgctctgtggcccaggctggagtgcagtggcacaatctcggctcactgcaatctccgcctcctgggttcaagcagttctcctgcctcagcctctgagtagctgggattgcaggcatgcacccccatgccctgctaatttttatatttttattagagacggggtttcaccatgttggccagtctggtctcaaactcctgacctcgtgatccgcccacctcggcctcccaaagtgctggaattataggcgtgagccaccactcccgacctcaagaaaacatttttaatattttctatggaggtcaggtgcagtggctcaacgtctataatcccagtggtttgggaggctgagacaggaggattgcttgaggccaggagtttgagaccagcctaagtaacacatcgagacgccatctctacaaaaaattttcttttaattagctgggcacggtggtgcacacttgtagtcccagctactcgggaggctatggtgggaggatgacttgaggccagggatttgaggctgcagtgagctgtgaatgcaccactgcattctagcctgggcaacaaagcaagaacctgtcttatcagaaaaaaaaaatgttgccatggaagtaagctgaattggtgggaccgttatgaacagatgtcgatgaatacagtccaaagtaagatgatttggtttttttccaccagcagaagaatgatcagattttgtgttttgagaagggcaaattgtctactcaaagtcttaactgggggaagctgtggggctagggctgccagcaggaatggcaaatgccatcagcagagaccattgttcctcattttaagtcgtatgtgaggagtcagaggccagggtgaggggcacacctgcaggcagagttggggctgccagaagtaagaagtgggttgtgtcagacacaagggatcttttcctgctagattctgttcctctctctgccatctgaaaacacccaaaacaccacattccctcccatttctttctccctggagtacaaaatggcaagggtcaaattgcttcttctgatctttaaatgtggaagagtgcgtttctcttatgagaaatgccttgcttgggtttaagaatataatatagacacattttgatcatttttataccaatgatttagaaatattgttggaaaataggtcagagagcttgtggtttaaactaaaattaaattcttccaaagtttcctagtgagtgattggttagtggcttaatgataactttatgtatttttggttttcttttcactagtctgctgctgtgaaggagatactgaaggagcaggaaaaccggaagggcctgatagccgccatctgtgcaggtgacgtgcaggggcagcctgtgttgcagcgtcattggtgggtggggtagcctttcattcgatggtttgattccaaatagctcttccccttcataaagcatgcagggcatctgtgttggtgtatttagtttgggtggcatgaagttggtgtcatttcagagatgaggacaattgttctgttttctgcctctccatgcctttggtctacatgctgtgaaacttagtgttttccgtgtttggttgacctcggaggaaaataaggccctctggaattcagtaaacagcttgttacagcaagtctctgtgccagaaagtctttgtgccagcacacaatcagcaaaatccatcaaacatcaacacagcagctctgtcctgtgcttgccctgcaaattcagaagcccccatggtgctttccgctggcttctcgggcgtttctgattgtctcagtaccgagtgatcttgggcaccgcattatctgccacataatttagaacaaggacatttggtgcttcgcagatgtcctcttctctttgtaccttagtaatattttattttctcataaccattttaagatccattcttgttgctttcctatcagatgatgttctgccattttggttttttcccatgctgtaatttttgccagcaccttccttgttgtataggtcttcattaaatatttgtcagggccgggcgcagtggctcacgcctgtaatcccagcactttgggaggctgaggcgggcagatcacctgaggtcaggagttcaagaccagcctggccaccatggtgaaaccccatctctactaaaaatacagaaattagccaggcgtggtggcgggcgcctgtaatcccagctactcgggaggctgaggcaggagaatcgcttgaacccgggaggcggaggttgcagtgagccgagattgtgccgttgcactccagcctgggggacacgagcgagacttcgtctcaaaaaaaaaataaaataaaataaaataaatatttgtcagaagagtgaatgaataaacgaatgaatgagtggatggtttggtaaacatcaacatcaaaacatgttgctgttgctattttgttcaatacagtaggcttttcaaaagaagttatgggccagaggtcctggggacttgatacattcgagtatcagtggttctcaatgttcttttggtgcacttgcaaggtcaaagcagatgctactgaggggccaggtgtggtggctcatgcctgtaatctcagcattttgggaggccaaggcagaaggatctcttgaaagccaggagtttgagactaaccttggcaacatagccagacccccatctcaacaaacaaacaaacaaaaaattagccaagcacagtactgcatgcatgtagtcccagctactcaggaggctgagatgggaggatcgcttgaaggcaagagttagaggctgcagtgagctatgattgcactccagcctgggcagcagagtgacaccatgtctttcaaacaaaatgttattcgccttttttcttctcagtctttcaggagtgacatcagagtaggatgataccatcatctgagaatttattattgtgttttaaaaatttcccagttttattaggttgatgtaaaagtaattgtggtttttgccattaaaagtaattggcgtggcacagtggcgcatgcctgtaatctcagcactttgggaagctgaggtgggcagatcgtttgaggtcaggagttcaaaaccagcctggcaaacgtggtgaaatcccgtttctactaaaaatacaaaagttagctgggcatggtggtgcacgcctgtaatcccagctactcgggaggctgaggtgggaggatcacttgaggtcaggagttcgaaaccagcctggctaacatggtgaaaccccgtctctactaaaaatacaaaagttagctgggcagttagctgggtatggtgatgcattcctgtaatcccagctatcaggaggctgaggcaggagaatctattgaacccgggcggcggaggttgcagtgagccgcgattacgccactgcactccagcctgggtgacacagcaagactgtctcaaaaaaaagtaataatttttaatatggcagatgttcatagatataacccacataaaagctaaagggattctaagacctaaatgtttgagaaccgtggcattaggggctgggaagaaccacagaggttgaccaccctggcaggtcttgtacgtgggcttactacaagagtcaccactagccttttgacctgccctgaggctcaggtaattatctctgccaaagggcactgcagtcactgcagcccaagcagctgctcccctctttggagagaaagtcacagatccttgagtttggttttctttggctctgctgctgtgaagcaagcctcagtcctagattctttgaccaaaggaagaaagagtttgggctgagtttgtttccttatgattctgctgaaagtaaaaaccacatgtcagtttgtcctgtgccacaaaagtagcaaaatcacttaaggtcaggagttcgaaaccagcctggccaccatggtgaaaccccatctctactaaaaatacagaaattagccaggcgtggtggcgcgtgcctgtaatcccagctgcttgggaggctgaggcaggagaatcgcttgaacctgggaagtggaggttgcagtgagccaagattgcgccattgcactccagcctgggcaacaagagtgaaactccgtctcaaaaaataaataaaataaaataataaaaataaaaataacaaaaattagcagggcatggtggcgcatgcctgtcgtcctagctacttgggaggctgaggcaggagaatcgcttgaacccgggaggcggagattgcagtgagccgagatcgtgccactgcactccagcctgagcgacagagcaagacttcgtttcaaaaaaaaaaaaaaaaaatcaaccacatttggcttactgttttgtgctgaggctagatggaatgccatgctaagaagcatgggccttatagtactttaaatcaacattaaaaaataaacaggctggctgtggtggctcatagctgtaatcctagcactttgggagactgaggtgggaggatcacttgaacccaggagttcaagaccagcctgggcaacatagtgagacccccccaccgacctctacaaaaaaatattttaaaaaatcagcctggtgtggtggtgcacacttgtagtcccagctactcaggaggctgaggtgggaggatcactttgagcccaggaatttgaggttacattgagatgtggtgatcacaccactgcacttgagcctaaaggacagagcaagacttggtctcttaaaaaaaaaaagtaaaaataggccaagggcggtggctcacacctgtaatcccagcactttgggaggccgaggcgtgcggatcacaaggtcaggagatcgagaccatcctggctaacacggtgaaaccctgtctctcctaaaaatacaaaaaattagccaggcgtggtggcgggtgcctgtagtcccagctactcgggaggctgaggcaggagaatggtgtgaacctggggggcagagcttgcagtgagccgagattgcgccactgctctccagcctgggcgacagagtgagactccatctcaaaaaaaaaaaaattatataaaaaacagtaaaaatagaaaacacactagcagtgtgtttataccattgaatatcctgcaccactgttgtgggcactacaccagaaataggaaaaaatgtgatgatgagctgagctaattgagatgagggttatgggaatggaacagaggagtgatggaagagatttggatcttttaaattggcaaacagaaaaataagattcttttttttttttttttttgttgaaatgggagctttgctcttgttgcccaagctggagtgcagtggtgcaatttcggctcactgcaacctccacctcccaggttcaagcgattctcctgcctcaggctcccgagtagctagaattacaggcacctgccaccatgcccagctaatttttgtatttttggtagagacggggtttcaccatgttagccaggctggtctcgaactcctgatctcgtgatccgcccaccttggcctcccaaagtgctaggattacaggcgtgagccaccgcacccagccaagattattctgaagtgttgcagttagggattggaaacattttgaacacaaagaatattagcctagtccttaatattgagtgaatgaggaacgcaaattggaagggagtctatgttgagaagaaaattaaatgatatttactttgagtaggggagggggaggaagtgtggagttggaggagtggacagttgtcagctgagatgcccaggtctaggaatgaggcctctggaagcaaggtcttggccacctggaggagctggggagttggcagaggtggtcattttgcatgttaccacagggtggtgctgttggctgcagaaggggacatggtcagctgcgccctctgcactgtagtgcagagtacagagcgttttcatccatcagaatcccaggtcctgggagagtgaaacgtctcttctccagtattccaaatagggttctgacgccccagaaagcagtgattatgagcttacctgataagtatgaaagacatcagtaaattcctgaatccaactgtaacataaatttattcacatcgtagcagtgattttattaccaccttgaagggagcagcctaaaaattctcgttcaccgatcactttcctcactgtgctatcatctattaaagtttactttaaaatgcaagatgatgtaggaatttcttcttaaattcttaccaaataaaaattaaaaacaatttataaatccattcaaataaaaattgataattattcaattcttacggacttctaaaatttgctaccatacatagctgtcttgtgtgtaaaaataacgtggagaagagacatttgaggcttttgatttaagagctataaatcaggacttggtctgaaactgacagctgatattaggcagaaagcttatgtaattaggtagtatttgtgtgatcttcctgtttgtaacagctacggtctgagtagcttgtgggtatattatataattccttccttggagtcttgttgaaaaatgaaaggacagtaagaccaagacctctcaggtttgctgacactaaaagtgtacaaactgtgccacaggatcttagccatccagggcaccttaagtgtttccaagatcaaggtgctgttctgaaacgtatccttctaagtgtcatgtgaggccttagaaagaatgtttatatgtgtggcttagaggaaaaaggtagaatgaatactttgtaaaaagctttaagatgaaataacaatgaaaggtatataaaatctttgtttttaatccttatttaggaccattacatacgcaatatgcttgtgaccctccctgaagttggccgttttcagtgaatacatttaaataaaaatctcaagttaggacctgccaatttggaaagacttcatcaactgacacttccatgtggttctttgcttaagtagctttcatcacgtgatgctagtgcctttatatctcacacttccaggcacttcacaggctatctccttcaaggacagtgtgctgtccattttaatcctaccacctggcatacttgggtggataggtggatgaacgagtgttaatttcccattttatttatttattttttatttattttgagacagagtctcgctctgtcgcccaggctggagtgcagtggcacgatcttggctcactgaaagctctgcctcccgggttcaccccattctcctgcctcagcctcccgagtagctgggactacaggcgcccgccaccacgcacagctaattttttgtatttttagtagagacagggttccagcgtgttagccaggatggtcttgatctcctgacctcatgatccagccgccttggcctcccaaagtgctgggaatacaggcatgagccaccgtgcccggcctaatttcccattttcaagtagaaaataagattacaaaagagcaataaaatccagaagttcagagagtaccagttgcctttagcatgtaactaaatctttccttttactaagagtgaggtaagaagttgagcccgccccagtgatcctccccctcctttggactcctggtatatgtggtccctgttctggggatggggaaggtgagagaggtgagcacattttgtttatctgtgtatgctctgctggtatcaaggtaaatcttcttgagtaaatggttattgaagtattttgagtttctgtgcttttgccagatgtgctcagcaaatcgtttgttataaacatactttatctctcatactaggaagtgtttcatttcagaatcgtagctgtatgtttggtaagagcctcttgattttgaagaatactttgctgttgcagtttttgttgttgttagagaaggggtctgtgttgcccaggctgatgttgaattcctgggctcaagcaatttttctacctaggcctccccaattgctgggattacaggcatgagccactgtgccaggcactattgcgattttttaaacatgggcttttctatatctgcacttagatctttttatttttattcttaggtcctactgctctgttggctcatgaaataggttttggaagtaaagttacaacacaccctcttgctaaagacaaaatgatgaatggaggtaagtatatgcttgtttttgtttgtttgtttgttttttgagatggagtctcgctccatcgcccaggctggagtgcagtggcgtgatcttggcttactgcaatccctgcctcccgggttcaagcgattcttctctctcagcctcctgagtagctgggattacaggcgcatgccatcacacccagctaatttttgtatttttagtagagatggagtttcaccatgttggtcaggctggtctcaaactctttttttttttttttttttttttttttttgagacagagtctcgctctgttgcccaggctggagtgccatggtgcgttctctgctcactgcaacttccgcctcccgggttcaagtgattcttctgcctcagcctcctgagtagctgggatcacaggtgtgctccaccacgcctggctaatttttgtattttttagtagagatggggtttctccatgttggtcatgctggtcttgaacttctgaccttgtgatccacccgcctcagcctctgaaagtgctgggattacaggcatgagccaccgcgcccagtctcgaactcttgaccttgtgatctgcctgcctcagcctcccagagtgctgggattacaggtgttagccaccgcgcctggcccatatgcctgtgtgtggttttttttttttttttgagatggagtctctcgctctgttgcccaggctggaatgcagtggtgtgatctcagctcactgcaacctccgcctcccgggttcaagggactctcctgtctcagcctcccgagtagctgggattacaggcatgtgccaccacaagtttcttgtagactgggcacagtggcttccgcctgtaatcccagtactttgggaggctgaggcgggtggatcgcttgagccccgagttcgagaccagcctgggcaacatggttaaactccatctctactaaaaatacaaaaaacattagccaggcatggtgatgcacactggtagttgcagctgctcaggaggctgaggtgggatgatcgctttaagcctgggaggtcaaagctatggtgagctgtgatctcgccactgaactccagcctggaggacaaagcaagaccctatcaaaaaaaaaaaaaaaaaaaagtttcttgtgtacctgtagaattttatctatcacatactcattatcctttttattttaactaaaatgagatctactaaatgtattgttctgcagcttgctttttttaacttaatgttaatatcttatgttatcttttaacagcacatgtagatttagatttgcttcatccttgttaagtacagctgctagtccagtgttggaatgtgccatgctgtatgtaaccttctcctgggggtgggcatgaaggtggttttctgcttttgcccttgtaaaccatgccataatgatcatccttgaatgccgctgtgagcatatctgagctccactttaaaagtgatgcacttttcattatactgcatgttttttaattactaaactttagttttttagagcagttttaggttcacagccaaattcccgtctaccttgacccactcgccactccccaggcccccgcccctggccatgcatagcctcccctactatcaacatcctgcaccagaatctgtacccacattgacacatcatcatccagagtccacagtttacatgagggttctctcttgctgttgtacattctacatacagttacatttgatccagagcagtgttttcctgaaaatccatggtttgtttatttatttaatgtatttgagacagaggcttgctctgtcacccaggcaggagtgcagtggtgtgatctcagttcattgtaacctccacctcttgggatcaggcaatcctctcacctcagcctcccgagtagctggaactatgggtatgagccaccacacttggctaatttttaaatttttttgtagagacagggtctaaccatattgcacagtctggtcttgaactcctggcctcaagcgatccttctggcttggcctcccaaagtactaggattacagatgtgagccactgtgccccgctcatggttttattttagttgctagaaagatactatgttatcattaaaacgatctgtttgaaaattggtactttttgctggatgcagtgactcacgcctgtaatcccagcacttggggaggccggtgggggaggtagatcacgaggtcaggagatcgagaccatcctggctaacacggtgaaaccccgtctctactaaatgtactaaaaaaattagctgggcgtggtggcgggcacctgtagtcccagctactcaggaggctgaggcaggagagtggcgtgaacccaagaggtggagcttgcagtgagctgagatcgtgccactgcactccagcctgggcaacagagtgagactccatctcaaaaaaaaaaaaaaaaattggtactttttaataaaagtctctggtttctgggcattttaaatgtaggaatttaatttactttaagctcatggagggattttagagcgttgaaagaaatggaaagaacagaactgggctccctttgtgatgtcttcagagggaagacaagcggagcgcgctcctgcactacctgaaggtgtgcctgttgcatctgttttcctttagtgcctcaaaaacattgaggttggtcaggcatagaaaaagatcagattgttgatgctcacacttggagtttacaaagcacgttcccgtacgttatcttggtggagcttcctggtccccagtgcccagcaaggcaggtggcatcatcctggcttcacaaacaaggagagactgaggccagagctcaagcccagccctctgccttgcatccagttttggcttcctgcccctcccctgctctgtggtagcaaaaggctcccacacatttaagttaccaggtgttggatttagtcagtaacctctattataagaaatggatacttgaaatgtctactccttcaggacacttcgagaggtagggctgcagtcatcacctgggggtctgctctgggtgaggcccttgtcctcactgtgaacttgaaagatcagtgtgacagtttcttctcagataagcaatcccatctgaagaccatagtcttttttctttttttcttatcttttttttgatagattcagggtctcactatgttgcccaagcagtacttaaactcctgggctcaaatgaccctcccaccttggtctcccaaagtgctggaattacaggtgtgtgctaccagctccagtccccataatcttttaattcctccgattttagaataagtcagttataactgtaatgtgtgattccgtttctcatttgtccactgtttgatggcatccgcatgcctggtcccatacccgagcactgaagagcagggtctctggagcctggcatcgtggggtggccctcagcttccccactcactgtgggaagtttccttagtgtctctgagcctgtttcctcatccgttgcctgaggataaacctgcttcaggattgttggtgaaaagacttccctcacctagcttctgtaacgccactgcatgccaccactgctgagtactgtttgtttgctaggttggtgtcattctcattttaccagaaagtgaagctctgagaggtcagacagccactaaatggcagacctgggatttgaacccagaactctgctcaggggtcaactgactgctccccaaaggccaggtggtaaatattgcaggctttctgggacttcagatctctggcagctactcaactgttgcacctccacaatagctacagacagtactaaacacgcagggtggctttgtgccagtgaagctgcatttgcaaaaacaggcagcaacctggcctcggccctcaggcttgtcgttgctgacctgtgtcctgtgtcttttgttttttttttttttttgagacagagtctctctctgtcatccaggctggagtacagtggcacgatctgtgctcacggcaagctccgcctcccaggttcacgccattctcctgcctcagcctcccaagtagctgggactacaggtgcccgccaccacgcctggcttattttttgtatttttagtagagacggggtttcatcgtgttagccaggatggtctcgatctcctgaccttgtgatctgccctcctcggcttccccatgtgctgggattacaggcgtgagccactatgcccagcccccccgccttttttttttttttttttttttttttttgagacggagtcttgctctctcacccaggctgaagtgcagtgacgcatctcggctcactgcaacctccgcctcccgggttcaagtgattctcctgtctcagcctcctgaatagctgggattacaggtactggccgccaggcccagctaatttttgtatttttttttttttttttagtagaggcggggtttcaccatgttggtcaggctggtcttgaaatcctgacctcaggtgatccacctgccttggcgtcccagagtgttggaattaccggcatgagccactgcatccggcttcccattgctttttctctgaagagactttaagacttggagtctggtttaaaaaaaataaagaaataaaaatcaatgccttctgctggttgaacgggaagtgtaaaatctgaattcgctatagggtcacaatcccagcctccagttcgcacagtgccttcctggtgctgatggggtgcatgttctgtcttcgccactaggtggaggcagttggtaaccttaaaccttttgcttctcgtggttaaaagtctgacaagaaccgtagaacctttaagcatatttaaccagtttaagccctgtttgcgatgttttagccacaaagatactgttcagtgaaccatttacagttgtgcctcgcgttgtcccactctcagctgtgcatctcactgtcgctctggaagacctagcccagccagtttctaggttagcatttgaaatggtcttggcctggtttaaccatcagtaaatgaggccagattatgataaaccttttcccctcaaactagggatcctctttttctctacaatagttaaattggaaattgtttatgtactctattcatttattttggtgggtgacctgattttttaaattttttagattagtcaagcacagtagtgagaagaggagaaagagtagaacaaggtgtaactgcctgtgaacgatcaattgagataactcactgccttcgaccagcagtggcttggtttctaatgacagtaagacaagttcctatagccattgttaatctccttggaaaagaaatgaacactgtgtggtttcagaagctcattaatatagcagaagcactctgcttctgtttgaagggaggttttcagatgaatttttctgcgtgttcattgaacagacgtttcctaagctcctccttagtgcctggcactgggaacagaagaaggaagaagagaaagctgtgccctcagggtgttctcaggtccgcactgagcggtggtgaccagagccacccgcctgcctgcgtggccggtgcatcaggatagagcaggagttcacagaggagctttgtcacttccccctccgctaaatctgttctgtggccccacatcactgagtggtgtcaccatcatccagtcacctgggacaggcagctgggagtcatccttgaagcctcctcacctaggccttcattgcaaacctccatttcctctggatcactgtcaccagcctagtgcaggcaccaccagcttctacccagagagcaggttcctttccatctccttctggtcccagcccagtctctgtgcgaaggccagaccgcagagggctccaggccccgtgacatggagttcagcgtgaccttcaggtgctggagagagttggcaagggctttccatggggaactggctatgccctgctttgcactctggacagttagcttttgggtgctgggcatggatcgaaggggcgcacagccggaagggagagctgtaatcatgcagagatccttcccctttaaagcaggggacaggcgagaaaggagatcgagtcaagaatggtgtttggtgcctttgacctcacacttcaggggtgcctcctgtgtgccatggatatcattggccagacagggactgatgaagacccagcctttttaaagagtaaacaataaacaaggaaatgaaatgttcatagattgtgatagattgtatcaatgctgcgagggcagtaaatagaatgcggtgatagagtcaatagaggtacctaatttggggaggtgggggtggtcacagataccctctctgaggggtttttgttgatgctgaaactgaaggagcaaggaactggaaagagctggtctctgggtggagggagcagcccttgagctcttcctggagcaggagagaacgtgttgtatacagtaagggaagctccaggtgggagagtgatagggatgggtgtggggagggaggttaggctctgtgtgcagtggagaggctggtgactacctgctgtggaggggcagagctcagggcatccatgcttaagagtcccagttttggtattatatttgccaagaaatagccaaccggcgggcctggaggtgcggggatgcggaaggaaagtagtccttgagagggaatgtggtttctacctgcacacgcacactcacatgcatacccgcctccattacgttgtgctgtggttgtttttgaggcatcagagggtgtgcgtgccgccacatgttgattggggtggcttctgcgttcagcgctgccgcatcccttcacccttccccggcacttcagaattgacacttgagctttgttgtaaatagtgatgtgagtaactgtcattcaccgacatctcccccaacacttaaagtcttagcagctgcatttaactcacgcatatttgtttcattctaacagtggtttctgtcaccctttgctctgcacagttttaaaaatacctttgtagggggcttctaagagcttggagtgcctagtaaatgtttttgaatggttagctacagtgttgggtttatatgctgtaatagtgaatttaattggtaagtaatcgtctttctcgtcacatagcccattaggatgtcaccttttctgtttctactttgcaggtcattacacctactctgagaatcgtgtggaaaaagacggcctgattcttacaagccgggggcctgggaccagcttcgagtttgcgcttgcaattgttgaagccctgaatggcaaggaggtggcggctcaagtgaaggctccacttgttcttaaagactagagcagcgaactgcgacgatcacttagagaaacaggccgttaggaatccattctcactgtgttcgctctaaacaaaacagtggtaggttaatgtgttcagaagtcgctgtccttactacttttgcggaagtatggaagtcacaactacacagagatttctcagcctacaaattgtgtctatacatttctaagccttgtttgcagaataaacagggcatttagcaaactactgattgtttcttgttttgtctctcatttcttttgtgaaattaaattccgtatcaccttcatttgcagctcttaactgtccatatggcactgaaataaaagaacagtgaccacattttacacagcaaggaggaaaggcatacaaacagaatttaagaggcttgtgattttctctgcttattagctgtgtgtttttaatgtgctattaaaaaataccaatgagg

SEQ ID NO: 36 - DNA, 25216 bp, synthetic construct
  source 1..25216: mol_type = other DNA
gtgtttttctattctggggtgtaaggggcagctggaccactccagctgggactgctaggaaggttgcgggtccacccggccgagccgaacgagggaaatggtcctcacccggccactcgccggttgaaaaggggccgccctggcagggaagcggccgccgcggcgcggtgcagcgcagcggcgagaaggagtgcgttatcgtcttgcgctactgctgaatgtccgtcccggaggaggaggagaggcttttgccgctgacccagagatggccccgagcgagcaaattcctactgtccggctgcgcggctaccgtggccgagctaggtacccggctgcccacgcctgggcctcccgggccagtggcacgcgccgcgctgggggagggtgcgcgggcggcttcgcgcccggcagtgcgcatcggagaggtcgccccttccatgcccgcctggcagaggtggcggtggaggccaggcccgcggtgggaggaggagggattgaggtctccacggccttttccttctaatctcttctaatgcttcccttaggcatgtgctgtggtgcttgaatgttgtactttaagaagcttcgcgagctgtcattcctctgtaggaatcattttccttttcatgaggatgacctttttaaaaacgtaatctgttttccatccttactgagatcatctctgtggtttatagtcttacacagccacactgtcattatcttgtgggtccaagttgtggacctaccttgtgggacttccgttattaacctgccactcacagagcatcgactacttgacctctttgagtgtaattcatctatactgtttaccttgcaggattctgagaagtcaataatatatgattgctaaacccaaggcaggacacccattagttgcgacatttttataattcctacaataccagggactgtggatatatatttgaaaagacccagttctgaccttcttacaggctgctggggagacagagaaagacaattataatgtgctacttgttataatgaagatattattaggtgtcataaaagcatagaagagcagttacatctgcctacatgagtaagaaaaaactttaagaggccatctagagtggaatgatgatgcccttgaatgagcaagtagcgtttattccaaggattttgtgagtagtatactcatgtgtttcctgtgaagccttaactgtgtattttaagattacccttacattttcttgcctgttacaaaaaaataaaaagaacagttctgatgcgttatcatttgtaaatgttagttggtcctattttaagagtttattttttaattctagcatagccagccatgatcagttgtttcgtgctcttccatttttgccttttagcccctctattttttaatgtctctcctttcgaaaatgatggagaatttttacttttcattgtttttactgaaataaaattcatcagcttaaaaagatctaaaagcagattgctgaatgatatttccaggttttatttttaattgatgtgtccccctctgactcaatggcttttatacaggactattcctcgttaaaaattcatggagagaattgtgtgtggagaatggatgggaatcaaaatgtgggatggttttaagtacaaaccacttcaggaacctgaagcatcatttaacaaaccagcgagaaaacaaaacttattttgaaagacataatctgtgtaatatggagaaatctattaagatttttcaggtttcatatgtcaataaaatattgcttgaagtctatgcaagctacttctgttctagggaaactgtcagcaagatactaacttttccaaaaaccagtggtaagatttaatattcacttcccttccccacattgttttctcttggaaaaggtatactaaggttttgtgtcaggtggtggtcattgaaaagtcttatataatgtaagtaatgttcatgaacttgtctgaatgttattattttaattattcaggacgttttctgtataaggttatgagctctatcttccttatgtaggccgtttagcttaactgtattaaggtaaaaggtctgtatctaatttaaaacttaaaaccaaaaaatttttccaaaatacagttagtacttgtaaggaggccatgagtaggcgatgcatataatttagtgctggaaaaataattccatatatgctttaattgaaaggatattgagcttatgacccttgcatataaaagacaacattataaactccattacatcttctgtatctcaaacattatgtcagtcattcatctgcatgtgaacatcacccacgaaattatagagttcagcttcatctagcatttgttatagtacataagaatatatagtgcagtattctaatgttacattagatctcaaataatcatggctgcagtcaagaggatagcacacaatatggtactttaaattatttcccattgaaaagcaaaaattaatgactaacagatattaaagttaaatttctgaatagaaagaacccaaggcttgtcattttaatttttattgttaatgtttgttttttttttttttttttttttttttttttttttttttgctagtgatccaggatgctcttgcgtagtgattcttaaatttgggactgtgtgagaatcaagtttctaaaccctcttcaacctactgaattagaatccatgggcacggggctaggaaatttctaatttttaaaatctccctagctgattctgatatattctaaaatttgagaacaaccagtcttgggaaaatattactcctatgattttagatttttgtttgtttctctgaatgttgtgggtttttccctgcatttgtgtttttgttagcaacctttcccctggatctcacaaaaactcgactccaaatgcaaggagaagcagctcttgctcggttgggagacggtgcaagagaatctgccccctataggggaatggtgcgcacagctctagggatcattgaagaggaaggctttctaaagctttggcaaggagtgacacccgccatttacagacacgtaggtatttatcttgattctagctggtaagtttgttatgagttctgtgtttgtctcctgtgcttttctgtttgtccaaaaacaagttagtttttttatcttactgatacaataactgaacacatacagcacatagtctttttttattattatttaggttttttttttgagatggagtcacactctgtcgcccaggctgtagtgcagtggcgccatctcagctcactgcaacctctgcctcccaggttcaagcgattctcctgactcagcctcctgagtagctgggactacaggtgcacgccaccacacccagctaatttttttttttttttttttagagagtctcgctctgttgcccaggctggagcacagtggtgtgaccctggctcactgcaacctttgtctcccgagttcaagcgattctcctgcctcagcctcctgagtagctaggattacaggcacatgctaccaaacctggctaatttttgtatttttagtagagatggggtttcaccatgttgatcagactagtctcaaactcttgaccttgtgaaatttttgtatttttagtagagacggggtttcaccatattgatcaggttggtcccaaactcctgacctcaggtgatccacctgacttggcctcccaaagtgctaggattacaggcgtgagccgccgtgcccagccagaacacatatagtctcttaagaagaaaaaaattaactactgattattattaagaagttactgtcctaaatttttagaaacgcatactcacgtatttagggatgaactgtcatgaaatctgtaaaccactttaaaatatttaattaagcaaaaaacaatgaagcaagccagatacagtggcttatgcctataatcccagcagtttggaaagccgaggcgggataattgcttgagcccaggagttcgagaccagcctgagcaagatggcaagaccctgtctctacaaagagtaagaaaattagccaggcctggtggcacatgactgtagtccccactacttgggaggctgaggtgtgaaaacagcttgaatccaggaattcaaggtggcagtgagctttgatcctgccactgctctccagcctgggtaacaaaacaagaccccatctctaaaaatattaaattgggccgggtgctgtggctcacacctataatccagcactttgggaggcacaggtgggtggatcacctaaggtcaggagttcgagactagcctggccaacatggtgaaaccctgtctctactaaaaatacaaaaattagccgggcctagtggcgcattcctgtaatcccagctactcaagaggctaaggcaggaaaatcgcttgaacccaggaggcagaggttgcagtgagccgagatcatgccattgcactccaacctgggtgacaagagcgaaactctgtctcaaaaaaataaaaaatacaaaataaatttaaaaagttagaaaattaaggaaatatggcaaaaatgttagcagttaataaatctcaatggtagagatagagggagttacatattatttacttttcagtgtttgaaaattttcttaataaaaatttgtataggtttaagaaagaaaaagtgaatagctgattatcatttttcttcacttaagaactttaaacacagaatttaaatttttcatattttttgaaaattaacatatatttattacagtgccaaatctcatgagtccctgtctcataatctaagaccaggctactctgaaagaggacagagttcactgcctaatccaacactggctgtagtgtaaatgcaacacaggtgatttttgccccagttccaaggctacctaactagctatgtgggccttagtcacccttaaaggaagatggttgcaactatgccagttagaacatttttctgctctgcttccacagtggcactcacaagaggaggacttgattttatagcttgtgtacaggagaatataaagttggcttcaaaggaggtaggataggtttggcatttttctcctcataatgtttcctgaagcatgaaaggatccttgatcagaagagtgctcagttctaatttctaaaatttgctggcttaatatttttaaagattcaattctccatatgagtaagttagcgtgtatcatcaaaaactatctagaactgtgtgcagagactgttactggttttccaagttgtatatttttgagtatcttaaaatatttcatcaactttctaaaacatcaagaaaagctctctatacaaataccatggttgattttaattattttgttttccatccttttaaaaatattttctgctttgcatcccattattattttgagtttcttttcatttgtagtttgttgttcattgtgttgttttacagctaagattcatttcatacgtttgatgcttagctgaaaaattacaataaattctccaatgaaattatgtatctttatttaatgaaaatgcctgctgcgtaccaaggtatgtactagggcatctggggtaagtaaaaacaaacacatagagcctgcctggagaagctcatggtctgatggaaagataagcaagaagagttaatttctaatcaatatgataaaaaggtcagagagcagtttctgaaaaacatgtttttgagttgagtcctgaaagacaaggagatgttagtaaagcagagaagggagaattcattctagaaagatcagacagtgtgtgggaagggcagagtctgaaaagagcatgccccatttggagaagcatcaagaagcccacgtgttagaagcaccggccccatgagacaaagacacagctagagagattgactaggccatgtcggaatgtcctcttattttatacatacataagcatatagatacatatagccaaagttacctttttaatgatcttttttacccagtgtattctggaggtcgaatggtcacatatgaacatctccgagaggttgtgtttggcaaaagtgaagatgagcattatcccctttggtaagttttgtttggaaaataatatgctgttgccccaaatgccttaatgtttattaggtttatgtaaaattgtacatttgtacccaaattgccttaagttatggacttaaaataataattacaatataagtccagataattgagcatttactgcagatgtatacagacatacatgtatatacatatataaattgcatatatagagatatttagtattttactgttgaaagaattcttatagagtacctttttattcctctttttattaagaactctcggctttagagtcagacagggatgggctcaaattcctgctctgctactgtataacctggacaaactgcttcaccttttttatcttcagttttcacagctatagaagtaatacaaaccattaagtgtttttataggacacggtgagatgatgaatgtaagtgtatattatttaacggaaactgaaaaaatcggttactaaaaataatatacatagagctcctataaataaatagaaatatagaaaacacacgctgggcggggtggctcacgcctgtaatcccagcattttggaaggccaaggtgggcagattacctgaggtcaggagttcgagaccagcctggccaacatggcaaaacgctgtctctactaaaaatacaaaaaattagctgggtttggtggtgggggactgtaatccaagctacacaggaggctgaggcaggagaatcgcttgaacccaggaggtggaggttgcagtgagccgagattgcactgttgcattccagcctgggtgacagagcaaggctctgtctcaaaaaatataaaataaaaataaaaaattgcatatatatatataattatatatataaaattatataacctctcagctggaccactgccatctaactcgtctcctcctccatcctcaaatgtgtacccggtatccagagtgatttatttgaaacacagatattaacacattattggtgtccttaaaacttgtcactggcttctaatcacccacaaaataaagtggagattttggaatgtgacttagaagatctgcaatatctggcctgtgtcttcagagaactaagcaattcattgattctcttggaaagagtggtgcactaatgagctgaaagattccactgcctgcacataccaaactgttcttcacctctgtgtctgtgtgtgtgtgtgtgtgtgtgtatagagagagagagagaaagcacaatagaaaaataaggaaaggataccaataggcagttcacaaaagaaatatacatgttcattaaacataaaaatgttcaaactcaccaataatcagggaaattaattaaaactaactttaagctgttagtggaaatataagttactatagtctttttggagcataaattacttgttaacatttttgaacgtgtaacccctttgtgattataatcatttataaatgcttctacatatgcattaagacagacacaaagatattgactgtagcagtgttgatgatagaaaattatttttttaatttaaactattgatttggaagcagttaagtaggttatgatatatttatggcataacacagctattgaaagcatgaggtgggtttcatatgactaacatggaaagatgcctataaaatctttcttagggttaaaaaaatctaagtcacagctataaaaaggggcaatatgtagagtttcacctttcaggcaacatttctttatcttgtttttgaaaaattgtaatgtactaagctatactaattgctttcccagagtcaattatggaatagatttatagtccttgcgttttggaatttcttccagaagggaaaggtttaagtaaaaagtgcaaaggaaatattataccagaacttttagggtggataggtttaatgtccttttgacccaatcagaacaattcattcagtcagtaggtatttattgggtaattatggtatggtatgccagtcttatacttaatactgaggctatagtaatgaaaaagaaacagtcctgccgtcattcagcttacagtaacagagtcgatgaataaacaattagaattatgtaaaaaatacagagaaaagagtggttatgagagatgcaaagagaaaaaatatgataatgtatgtgctcatcattgtgtggagaaacaggtatgagagatgcaaagagaaaaaatatgataatgtatgtgctcatcattgtgtggagaaacaggcattttcacaggttgttggtggaagtgcaaattgataaaggttttctggaaagcaatttgacaggctctagcaaatgttatgtaaatgttcaaatttcttaaagttatgttcgttaaataaattatggcatatccataaaatgaaatactgtcaaactattaaaaagaatgaggctgctctatatgacctgatagggatagcctttaagatatgctgttaagaaaacagtgcagaacactgtacaacttgacattctatgttagcgcttttacaaaggaacatttatacagatatgcttgtgtatgcacaaactgtcagtcataacttagtgtttaagactgtgggctctgcatgcaggctgtctggattcacatcttggctgtcccactgattagttgtgtgatttgagctgccattcaactgctctatgcttcagtttcctcatctgacagagagaatgacagcactgtcatgagggttgatatgagaatgaaatggtatttttaaaatgctcagaacagtgcctgacatgagcattcagtgaattcgttattatctctggcaagggatataataaaatagtaattgtgattgcttcactggaggggagctggacatagaggtcagaaggagacttttcttttatacccatttgtagctcttcaagttattttaaagtaaaaggaaataaaatgcttattttccccaagagactactgcagtaatctgggttaaagttgaccggagtctagcctttgtctgttaggctgactacatctatgcagtttttattcccctgtagttggaattaaactacaattaaattatcaattcagatgtgtgtatctttgaagcaactgctctttcctttggatttcaggccatataaggcctgaaattttcactcattgtactcctttaacctcccatcagtaaacagtcaaactgtttactttactctgtgacttacttgggtatatccttttctttacttgatctgaaatctcttacctaggccctgtaccagctcagtattggttcactataaaattcgtgaaattaatggcaactttaaaaagaatttccttctgcaattaggaaatcagtcattggagggatgatggctggtgttattggccagtttttagccaatccaactgacctagtgaaggttcagatgcaaatggaaggaaaaaggaaactggaaggaaaaccattgcggtaagttctccaattaaccaatacctctctttttcccttggccaccgtcatatttttaacaagtacctaatagaattatcatccagtatgcagtaaagatattacttctgacttttttaatctggaagttcattaagaggaacactaagctggatcttttctttgcactaggaagtgtacatgttctataccagacaaattatatatgtgtaatgttctttgctgcttttcccagccaaggctagacttgtcccctactgcaggttaacataaacagtttgattattaaaatttgccctggtgtgaatctcaattttgccactgtggcttggtgttgtggaagtcacttaacatttctggtctcttgggttttcatctttataaactcgctcaaaaggctgtcatgatggttaacatgcctgactgctcattagtgtgaaaaaccttgctttcattccctttctcctgcagaaagagagtagcaaggataacgttgcatattgtcccaactttcttgttgaatctcattcctccttcatcttgaagccctctttttccctaatatggctttgggatataaaatcctcccattgcattacactatattactaaaatccacctttcttccaagggtttcatgttcaacagtttattaaaataccacttagtttcccctgggaaagggacaaaatcatgcagatggatagacctttcccagaaaaaaggtaattacaggatgacttgagctgagtacaaagggagctgctcctgtgaacactccaggtctgcagctgagccagaggcaaaggagggtttggggccatcttcaccgctgaccactgctgtctgcccctcttcatgtagctgactcagtggaaaaggagactgggctgctgcagcccagggtccccttcagccttcaaagcatgtagagaatatgcacagcacaggagaaaagggtaccactgtgacttaaccaagtagtttatagaaccccagggcccagtttgtcatcttataacaacttctaatgactaaataacagggagaagtcacactgccttgttggataggaggagaaaactggttattaggatccagaatatctgagtttttaactgatcactcagtttttttcccctctttgttcttaatgttggaaatttttggattgaatgcacctaatgtagtacactttaataatcaaactctttatattaacctgtaataggggacaagttatatactacagtaaaaagcatgaacattgagatcagacagcctgggattcaaagccagtctttaccatattttagctttgtaatcatagtcaagttccttacccattttaagccttggtttcttcgaatgtaaattagaatcatattatatacctcacagaattttcagtattaacatgcatctcatgtatattaaatgcttggtacttagtaagtgctccataaattttagttacagtgatcatcattcatgatcataacttctcatgtatcataacagcaattatgtgtgtccaataaatatgtgatattatctttttggtgagattcagagagtgtgatgcctgagtaaaagccacacaggctagtaagtggtgaaggtggcatgtgacttcaggtttttctgactacataaagctcagactttcttttaatgccagaagttttcatatttgtttatgcttcttcagcaccattcttcatctatctatagagaaatgagcaagataaagatagtctactaaatttttttgaagctaaaattcttccgttttaagaactttttatgaaattgtcctttttacttcttagtctgtcattttttatgagattaattgttgttaatgtcattatttgatgaactctaaaaatttgcaggtcccttccatcaccagtaaaattaacccagaatctgataacctttggttttctcctataattaatacatgtactgataatataaaatatcaagaaaggtatttttatccatttaataatctgagaagaggatgatacagtgtataaagattttgattaaaaatatttaagtcaaatgttggccttttttctaaaggattattatgtttatctgtaaattagacttgcatagattgcttcatttctaataattctggataaattatatctggatgttatttactccagattataagagctataagtgaagcttatccagttgaatttcatacacaggaatacatggagttttcacatttaattattattctccttagatttcgtggtgtacatcatgcatttgcaaaaatcttagctgaaggaggaatacgagggctttgggcaggctgggtacccaatatacaaagagcagcactggtgaatatgggaggtaatgaaaactttgttaaattctaaaaagtcctaattgccttaatagctgtaagcacttatattagggaaattaaaatttatgttttatttttaatatattggtgaccatatattgttgactggctgtatagatgttctaggtcataactgaatattttccacagagcatttttgcttcattctatagtgatgtatgaaaaggataggatttactaaaataggcaaattgtgacaataaggacacaaggctaaactatttgtaaggcctcccctccagtccagaccttcctttaagattaaaactgatatatacagctatctgatcattattatatccagactgtccaaatctttcccctggcaatcctgctcctattcctaaataatcaatttttatacagtctcacaccccaggctggaaacctcaatgttctcttaactcatccctacccctcacttctcatattcacataccaattctgtctcccaaatatttcttaaaagtttttcccctccgccgggtgcggtggctcacacctgtaatcccaggactttgggaggccgaggcgggcggatcacgagctcaggagatcgagaccatcctggctaacatggtgaaaccccgtctctactaaaaaatacaaaaaattagccaggtgtggtggcaggtgcctgtagtcccagctactcgggaggctgaggcaggagaatggcgtgaacccgggaggcgaagcttgcagtgagctgagatcgcgccactgtactctagactgggcaacagagcgagactccatctcaaaagaaaaaaaaagaagtttttcccctcctatacgtactactttagtatccttaaaatgaccatttctacaccactagccttcaaaacctctccgctggaccactgccacagccatctaacttgtctcctcttccatcctcaaatgtgtacccggtatccagagtgatttatttgaaacacagatattaacacattattggtgtccctaaaacttgtcactggcttatcatcacccacaaaataaagtggaaattttggaatgtgacttagaagatctgcaaaatctggcctgtgccttcagagaactaagcaattcattgattctcttgcaaagagtggtgcagtaatgagctgaaagattccactgcctgcacataccaaactgttcttcacctctgtattttctgtccttttccctcctctcctacatagttttcttctagaggtcctctaatactcagctaaggtgtcttcttcaccaatatatttttcctgaacctgccacaatcccttcccccatgccatgttgtattatatgcccttttgtgtgtttctatagctattattgcttgtgtctcttttccttgcctgctactgcatgtccatatcctccactatattataaaccctttgaaggcaaggactgtgttttattcatctttattttcccagaccctcatacgtagtcaataaacatttgaagaatgaattaatgaaataatcctttctaagactaattatatggttctaagaaatatataaatagcatgtttgagggttctagaaatatagcacctaaacatcaaaggaagtcaatctgttttcagctttgctattagagtctgtctgtgtctactgtatatttgtggatattttgattttcagaaaatctttatgattgtactttcttaattcattggttcaaaatctattgtagccaaaatttctcttccaagttccagctatttactcagtatcttcttttggatatctcaagcacattactttgaatatgtccaaaccaaactcttttatcacaccaattctttcttagtatgagaaagaagctagaaactcttctttcacaccattctttctacattcttcataatttcaaaaatatatcaccactctctcagctgtacaagcagaaactcaggcatgatttttggctcttctctttcatttgctccattgcttatatccaagcagtcaccaaatccagtcgttccatcttccagatatatctcaaactcatacacttttctccattcctggagccattctgtagtccaagtattatttatcccctcctactggaccactacagaggccttctaactagtctttccatatctaccccattcccattttgccccactatgcctttgaaactgattttatcaagattacctttgctactaccttattttttttaatttaaaactgtcttcattttcaccatccctataaatggtgcctctgtcctttaaattgttcacactcaaaaccttgcagttgtttttgatttctttctccgttccatattcggtttgctggctgatcctgttgattcttcaaaatttatccagaatctgaccagggctccacaactccctaattcaagtcgtcatcatcgcttactgggattactgctctgccttgttttcctgtagtctactcttaataggaactattgagttctattaagttccagtaagaactcgatagttctattaagttctaaatagtaaccttgggcagtcactcctctgctcaaaagcctcccctggcttctgctcttcatcatctagactctgctacttcttgcatattctgctgctgccggcccagtcttctggctgttcctctaacacagcaagctgactcctgactcagggttagaaaacatactgtatttttgcctggggcaatttctcttagctatctacagggttgttttctcatgctttcttttggtctctgttcaaatgtccacttatcaagaggtcttgcctgatcacccaatttaaaattaatagaaactattcctccctaccctctggtactctctgtcccctttccttaccttctttgtcttcagggcatttacttcaagagcaagtgcatctgaaacaccatgtagtttactttattgtctcatcccacaacagagagcaaggatttttgttcattttgtccatggctgtttcccccaatgtgatcaaatgtacctatccattcttgcctcattacaacttacttccccatactttagtgtgggttaactttatataactctagcattgtgatgtcattctcctatttaaaacccttccatagctcttcattgccattagaaaaatgtataaaagggccaggcgcggcggctcatgcctataatcccagcactttgggaggttgaggtgagcagatctcttgagctccggagttggagaccagcctgggtaatatagtaaaaccccatctctacaaaaatattgaaaaattagccagatgcacacctgtaatcctagctacttgggaggctgaggcacaagaatcacttgagcccaggaggcggaggttgcagtgagccgcgatcacgccactgcactcaagcctgtgtgacagagaccctgtcttgaaaatgtataaaatgcttaatgtagaataatagtcaggaccttttatttataagtgacaggatctcaattcaaattacttgatcaaattacttttttggctaaaaaagtaatttattggctcaaatactgaaaggcccaggggttgagctgaatttaggcatagctagattaaggagtctaaatgatacatttgactttctgtctcttcttctttttctctccctctatctgtagctgtgctttccttgagaacaagaaggattccttggtagctttcatcctggtacacattcctgccccaagcctagcatattcttgacacaaaagacattcactgttgactgatgaatatttaaactttttccattgccagatttaaccacttatgatacagtgaaacactacttggtattgaatacaccacttgaggacaatatcatgactcacggtttatcaaggtaaggattgttttagttggactctgttttttttttttgtatcactttttcttccatatttgacataaattctttaggctcatttgattgggattgtactggcatcacctttagagaagagtacatttataaagagaaatttcttaaagtttcttgcagttagaatggggaagagacagacaaagttgtaggatgttttggattaaacctctcaaaatatttgcatcttgatggggccatcccaggaacaggctatgatgatggactctccaactcatttcaacagatatgtttgagtgccttttatgttaaaggcactgggcagggctctgcagtgggcaccaaaggggtaaactcaattcctacccagggaacttaccaaccaggaaaacaagacaaatataaaaacactctacaggaaatgctaaaaggaagcaactagttactacagggttcaggggaaggaaaaaacataaccacttggaaggatccacaaaggaggtagaaatagacaagggttttcaaaggctgtgactcttcacagaaagggatacgaagggctttccaggaaggagcagtaccttgatctctttgcaacacaatttcaaattatccattagaatgacttattttatagatgtctactgtccttgacattatagtgatttcatttagcttctgatcgtttccaaattctaaaacttcctatgctatttagatgaccctaaaagtagacaaccctaaaagtgtaatagtgtcaagtcaaatatttggaggtaggggtgtgtgtgtgcacgcgcatgcacacacgcatgtgaatttaaccactccaagagtattactgactcggcttttgcatgtactgttctatcttcttgtaacattcttccttcaggtcttcatatacatgtgtcctttgtaaccactcaattctgctgtcacccccggagctttccctgactgcctgtcacccagttgctccctgtcacacttccccatgtttttttcatagcttttgtcagcttctgaaattatttatttgacttctgccttttcccaagtgaagtataagctcctcaagggcagggtcttacctgtcttgttcactgcctagaagaatgcttgacaccagcaggtgcacaatgcctgtttgttgactgacattctttttgttgtttttctacctctttaattaatttagcattaattttaagcaaaaagagcattatgaagcttgtaagaatatatttagtattatattctttctgaataccacattccctttcctaagctacaaactactacataccatctttcaatttcatttatttgtatttatagtttatgttctggactggtagcttctattctgggaacaccagccgatgtcatcaaaagcagaataatgaatcaaccacgagataaacaaggaaggtagataaaaagtcttcagtatccatgtgcttgaatatctgtaatacctttgtgttttaaagatgcatctctgcattttttattgatagaaatgtatttgtgtgttttttgagaaaattgagcgcattttttttatgcaattacctgctctttgatgaaaaagtgacatgcatttggggagataagctaattaacaatcatattatttagacacaagatttttattatgactttattgtttttaaagaattgttaaaagcatattctgctgagaatttacagagcactttcttcagacgcttatgacttgagtaggtaacgtggagaatctgatttgatatgaaatagtatgttctccctggaagagaaaagatagaatgaattctaaatataagaccaagggtggcatgaatcagaagagttaaccttgaaaatatctttaagatcaaaacaagttttctgtatctgtagaaccacaaatatttttctaaactagcagaaattttatttatttatttattttttttgagacagagtctcactctgtctctcaggctggagtgcagtggcgtgatctcccgctcactgcaagctccgcctcccaggttcaagccatcctcctgcctcagccttctgagtagctgggactacaggcgcctgccaccatgcccgactaatttttttagtagagatggggtttcaccgtgttagccaggatgacctccatctcctgacctcatgatctgcctgcctcggcctcccaaagtgctgggattacaggcgtaagccaccgcgcccggccaatatttaatttttataagattccttagacaatttttatgtacatatatatttttttacacagaaaaaaattaaaaggatcttgtttcctttttaggggacttttgtataaatcatcgactgactgcttgattcaggctgttcaaggtgaaggattcatgagtctatataaaggctttttaccatcttggctgagaatggtaaagttaggtttacttcctttgttttttttctttgtacttaaattacttttaatttataagcattttcccttttctcttctggtttgaagcatggccctgccccccaaatcaaggtcctttctttcttttttaaatcttcttttatttcctttcacttctcctcagagttatcttgccttctgtggtagagtaaggtaaaataagttacatccattgacgaataagttgatagtcttgttataaagccagtaaatagattttctgtaatgtaaaatttttagtatttcatttagtcatattttaatacaatattttagaatatatatacagattttacactagagacctctcctacaaaaaaaaatactgtttcaaaaaaatttgttactttgatagcagatgttacattacccattaatatttattaccacaaaactctgcttagtaagaaaatattatgtcatttttatttggtttagatgttatttttcattgcagtgaattaagatatagaattagatagacttgtttaagcaatatagcaaataaaatatagaattctaattctataatgtagaattagatagacttgtttaagtaatatagcaaatataataaaaacaaagtgctgacgttttttgtaagttaaaacatttgaaagaataggtgagttataggtttagaaattcaagcaatcaaaaattaacacaatatattataatacaattatatataatgtaatattatatgtatctttttaattgagtacctacatcatgcaaagccctatactgaggactcagctttgaataagaaactataagtgataaatgttatgggaagagtgcataatgctatggaaatatatagcaaataagcacagcctaagctggcaattgagtaaacctccctggagaatggacttctgaatttagatttgcaaaatgagtatgacttagccaggaaagagggcaggaaaaaaaacattctctatagagggacagttggagtggacagagagcagggtgagttcaaggaaacctagcagaccaagctacagagacctcatggagagagtcaaggggtgagaccacagagaggcagacaccacactaggaaggaccatatgagccagaagagtaatgggcaccagtttgaagaaatatgcatttttagaaaatttgttctgcctgtcgtgtggattgggaaaaggccaggagtagtgatatatgagagataatggtggcttggacaagagtatgacagtgggaatagaagatggattaaaaacatgtttaggaggtagaaagggaatagaaacatgactgattggatggggatgggagaatggttggagaagataaggaaaagtcagacttcattcccagattcctgctctgagcaactgaggatgatgatgtaatttcctaaaacggggatcatctgcagggaagatttggggataaaataaggttagtttaagacctatgaaattttggatacccataggacatccaagcagagatgtctagatgacaaactgaatatattggtctatgtcttaggagagaatacagggatggaggtttagatttgagcattttccacatatagatggtaattgaaatgttgataataaatgatatcatcaaggaatagtaggtatttgtgtattaacatgaaagtaatagccaaagcccttggcaatacctgataaaagtataccagagtttgagatgttattttggtggttttgattataccttgaaattatgtcaaaactgtggttgtttcttactggaaaggtaaattttgatttggcctgcataaaccaggcactgttataagtgctggtaacactgaggaataacatagtctttgcactggaggagcttacaatgagatgtagaagttaaacatgtaagtagttaaaattacagaaataataaaaattactaaataaatactactgaatcacttggtatatggccaacactgtgctaatcattttcatgacttaactcgttgaatttccccaacaatctgtgcagcaggttactatcatatccctcttttatagagaaggaaacaaaaagcatcaaaagtctaaatagcttggccaggtgagtggttcagggcatcaaacccaggtggcctgacacccaataacacagccttattaaggaggttgtattcttgctttaccagtggtatgaacagtactctgtgggaacacagatagtggagtggaaatggctatgaccatatttgggaagtcgcaagaggcttcacagagctgatatttgatctgggctttgaggcatcaataggcgtttgtcaagagaaatataaaggtgcaacatgagcataggcatcatgtcatgtgtaggcctgttatctttgaagaactacagaaaattcagtctggttgaagaataggtcctcataggggaggtggtaggagataaggctagagaagtacttaaggaccaagttgggaagaaccttgtgggccaagcctagtagtttagatgaactctatggagcacttgcttaagcccgggaacaatgtgctaaggtttgtttgacagcaagattactttggaagtcgtatagtagatgcattgaaagctaggatgtaagaaaggaagttctagcaatgatctaaccagttagatgactgtagaaatggagaggagataaattttagggacatttatggttaactccataggacttagtaactgattatatgtagaaggtgagggacagaaaaaagcaaatgggacttcctgtgtttctaattctaatgcaggaaactaggaggatgagtgagaccattgcagaaacacaaactcagggtcaggagggatgaggggcaagtagaatatttaagtacaaaggatgggaccactttgtttaatcctttgtctttatacatatgactcaggaagtataaataaggaaaaaaagagtacttaatacgtgcaaagctctacatacattactttttaaaactgtataagaacctagcaaaacaagcagtattatcctcatttttcagataagaaaatcatggctcagagtataagaagcttgcccaagttcatgtagctagtatgtggcagagctgggaactgacctcagatctgttccactcaaaaccctacgctccttactgatacaatatactgatttgctcaacatcctgcagctagctacagaagttttaaaattgaagagacattcctagcagtggaggggtatttaaagaaaggctggctaaccaccaaagatcaccagaaagtcactgcctggttgacttgccacagtgcatgacccagagcacagaaacctaattcatgagcatttccaagtaaattggccttgaaaatacagattcgactcagctgatctcattgacactgatgatcaggccacaatagttggctcattcacactgcacaacacatttggcaagtgatctggatgttcaagtcctctggccaatgtgttttttcctaaattcaagctatatgggtactcaagtaataattagaaggttactttcttaacacagattcaaaacaggaagagcttatttgtaaacttaatcaacccaagagagctcttatatgttcaactccacagtagcaggcatgaaaagggaccctgcttctggtttttctctagccttatggcaaaagatagaccaaaagaaacaatatgggttcatatacactggattatttgcaatgctcatagctgtatcagcgagaaaatcagcaagcaaacatagtgcccacatgtgctactcctgtacagaggcttggtaaatcccatttatataccacccacatttttggctatatgatctcccactctttaaaaactctattcaaaatctagctaaactctatcctgatcccttctactgggtagaggtactatgaccttgctttgctcagtccctggttagtacttatttcatttgcctatggattttgttgctataatgtcattaacatgaagaagattgattaccacagcaattaagaatgattgcataggggttcttaactaagacctctaccttcttcatccaactccaagtatattggtttacttcatttttattacaagaatatggtatcatcgtagctttatattccttatttcatctatgtcatcatacctttaaataaccaagatatattctcctaaatccactatttagtgaattctcagtttactaatatagcatgctcagtatttccaaacaaatatgagataaaccttgctttacaaacaaaaccaaatacatttgattttctaattgcttaagcttatttatctactctagaatgatagagctactctctgttcaattttgattagaactgaattaggcaggaattattagatccaaggcactctttctctgttccagtgtttaccctgtgatttccctctgtgtctttacagtttacatctttagcatttatgtcctcttctaacccttattcttttataattcctttagatgtagccataccttcattcaagttaaagacaagcctttctgaactggaagggcttttttctatttaatgtgaatttttatataaatgttgtgagacatcaggtgttggttttatgacctaaatctccatggataatctttcaccttcctcactttcaagttctaaagtgacttatttttatgctccatatacaaactagatatagaaaagcctgcctagaattcaggcatcttgagtcccagccctttagccagtaatggttcaataaaaagaactctgagaatggaaaacagaagcctgtggtctagctctacaacatgtcaacaggcatttgactgctaagcttcagtggtctcatctgaaaatcagggatattaatatctttcctttctattgtaagatgttgtttagagaaatctgtgatatataagacataaaaaatgctttgtaaattataaagtcctttacaaaggtgaaataccaaaatatttgttttcagcctaagtggttgcaaaatgactttgtcattcaaatatatgtatgcacatatgtagactatttataattgctttgaaatatgcactaacttctttggttaatctttcagaccccttggtcaatggtgttctggcttacttatgaaaaaatcagagagatgagtggagtcagtccattttaaacccctaaagatgcaacccttaaagatacagtgttcagtattattgaaatatgggcatctgcaacacataccccctattatttctacctctttaggaagacacctattccacagagactgatttatagggggcagcactttatttttttctggaaacccaagttctctttgactcctctttttgtccaaaagtgatctggtcggatctcacaaggccatccaatgagaccccgcacagcattttctaaagaagaatcgaagcctgaccactttcaccttgggcaagaaggtttggcctttgagttgctattctatgctgaagagcctgcttagaggaggagtaccaggagggagccagcatttcagatctgaagtagacgataggaatgtggaagaacacatacatagtgcttaagaaatacatttaacctgttatgtcagtatttatcaatgaagtttgataattcacttttctgtcattgttaaagcgtacatactgtaaattaaagggaggtgaatggaaattaatgaataaacattttgagtttccctagtgttgaaggaaggtgtactttttcttgtcagaaagataaaaaaaatcaagttgagatgatgtttgaatttcaagaaaagaggctgctttctgtcagtgccctctcattagatctgtgttaattagttagcactccactgcacatgctaatgacttcctctgacagccacacaccgaatcttgatgaaaaaagagaagagcatttgccttgttacatagtctgttacaagccagatatgttgctagctctcaagagttgtaatatattaagaactacaacttatttgattaaaactcagctgtatagatccttttataaagcaccttttgttaaacatcagcctttcattggtattttaaaagcaaggcagatagatatgaagtcagccaactctgacatgcgtcctttcttatctcccttacctgacactaggggctctagagaggcagagagagcactcacaaatcacactaaaactgccagcggcctgactcttactcagtttagcaaaaattcttgcctaaaaagtgataagtaaaaatctgtttatggtatacagttatgtctcgaatctttgaatcaaatccatgttcttattttagaaaggtaagagttcttcaaattcagctacataccaccggctctcccaacctcagacggtgggcatttctggatggatggctgcggttatggataaaggctgtaactgttaacacagaaaaacatgaaaagctcaggcccaagaaaggccttggagccagccaaacagaatttgttctaatggacatggatgatgttgaacagaaaaaagtttacaagtgctttgtggttgcactaatgtatactcactgccattttaagagggggaagtacattttaaaatatatttgaatgtcatgtactgatatgcagtagcttattgtttttctagttgcagagaatgtgaagtttaatctcttaaaatatttagatggtctactttttcattgaatttgtcaatatgtaattgcgttgtaaaatattatatatatatatatatatatatatatatatatatgcttaacttcccaagtgttctgcattgaaccacttagggaaaattttgtttgtttttatgttttgtaatttttaaaattaagtaaagactggatcaaaataattgcatccaacctggaccgtgaa

SEQ ID NO: 37 - DNA, 47228 bp, synthetic construct
  source 1..47228: mol_type = other DNA
actccccctgcctcctctccgcctttaacttctcgggaagatgaggcagtttggcatctgtggccgagttgctgttgccgggtgatagttggagcggagactgtgagtgccggctgcctcgacagcacgtttgcgacgctcggagtgaccttcgagcgactggggaccgggggcgggagtcgtgcatgcagcgttgtgtgacgaggcgccgcccgccgcggtcctgtgggaaaggagagagccagctgtcgggcgaacggggctggcggccgagtcgagcccacggagcccacgaggccgtgctcgggggtgggattgggggatccggacctagacggtcgtgcgcggggcgggggtgggctctggccctgactcctgcgcccggtgtgggaaggtgggaggccttttctaaggcaggtgttcacaccggccggaccggggcgttacccccacccggcttttcccacgcagctccttcgcgcggtcatttcttgactctctggaagaatccgccttctttatggccactgttcctttccatgtacacaccaggattagaccgtgattgtttgtctttggtgtctttttcttgagaaaccacctatgctttcttaaacttatagtccttgaagtttctggtactttggctggaagcgttaatgccctcttgaagccttacctttctaaatgtcagcctcacattgtgatcttagaattttatttcctcactctgcatatccactcctactcacctagagcttcaggttgagaaacttagtaacttccttattgtgtgtgaatttggcttcgcctcactaaccctgttccctgatgtactttagagtcacatgcagtgacaaacttagtcacaattagtttcgtcttcaccaaagggaaattgagtagaaattgcaaccaagattttggctaatagatttcacttattttagtgaaatatcattcaaaagtcgtctctaactgtctgactagaacactcccaaaaaagaattacctaaaaacattttgccagcataatttatttcattggggagttgatgaatgtcactggtgtgtcatcagtttgcatgtctatcatccactttagttggtgcttttctaactttatctccctctagtagcataatggcagaacctgtttctccactgaagcactttgtgctggctaagaaggcgattactgcaatctttgaccagttactggagtttgttactgaaggatcacattttgttgaaggttagttcttcttaagtttttaaagtaattactgttgaaaatatataaaagtgcttattctttcaacgttagttattgaacacatgtatagggcattatactgtatactatgagaagtaccataatgaataaaacccctttctaacctccagaaggggaaaattaaatggtattaataacaactaagaactttagtatattaatagctcatttaattttcatcaccactaggtgatgagaaatagctatgttaatagttcatttaattttcatcaccaccatctgtcattttaaagatgaagagacgaagtcaaagaaaagttaaacagtttgcccaagatcacacagctaataagtgcccagacaaaaaatcaggcagtccacatttaaccattatacttgtctcctccccaatttagcagttaagccaagacctcagacatatctcattctctcaaatgaggctgaattgcagtggaaagggggaaaaaggagtttcataactgttaaaggtgatgaggaatgtcatgtcttactagggaatacttcttttttttttttttgagacagagtcttgtcttgttgcccaggctggagtgcagtggcatgttcttggctcactgcagcctccacttcctgggttcaagcgattcttctgcctcagcctcccaagtaaatgggactacagtgcacgtgccaccatgcctgactaatttttgtgtttttagtagagacagggtttcaccatattggccaggctggtctcgaactcctgaccccatgatcacctctcttggcctcccaaagtgctgggattacaggtgtgagccaccacacccggccaggaatccttctttggagataactgttgaaattttttctggttcttaagattatgtacctctcggccaggcgccctgactcacacctgtaatcccagcactttgggagtccaagatcggcagattacctgaggttaggagttcaagaccagcctgatcaacatggtgaaaccctgtctgtactaaaaatacaaaaattagctgggcctggtggcagacgcctgtaatcctagctactcaggaggctcgaggagggagaatcgcttgaacctgggaggcagaggttgcagtgaaccgaagtcgcccactgcactccagcctgggtgacagagtgagactccatttcaaaaaaaaaaaaagattatgcacctctcaactatacaatggaaagggagggattctgtaaatttttccagcgacagtggggaaacctttggtagattgggaatcaaactttttttttcatgtctctcccaaccctctcttaccatattttgagctcctttagggcaggagcctgggattcattgtattcctagcaccagacttgacacaattcaatgctgaatgagaaaaaaaaaatagtagtatagaatctttgtttccaattaggaaataatttgagctggcacagttgactttttaaaaatatttttttttctaaaaataataggaagtgaaaatgaagttaaatgtgtattgtacgtgttatagatcatgcatcatgctaggcactagtgaaatgacagctttagaatctgaattcagttgtacaggttttagaacctcagtaaaaatgttgcaaaaaggagacaaagcaaataaatcaagaaaaacatacaagagcaaaaataaaatgaaaagcaaaaataaatgtaatgatacttaaaccagtctgtccgttattcaccaaattgcacatattttattaatgcgttagaaaagtatggtgagatatgagaagcttaattggatgtgcactggagaagttttaagtggcagtgtttgtctctaattagggtcattcagatagccagatgaatctttttgtttttgtttttgtttttttgagacgatgtctcactctgtcacccaggttggagtgcagtggcaccatctcggctcactgcaaactctgcctccggattcaagtgatttccagctaatttttgtacttttagtagagatggtgttttaccatattgttcaggctggtcatgaactcctgacctcaagggatctgcccacttcggcctcccaaagtgctaggattataggcgtgagcccccacgcccacatgaatcttcatgtctttaccttcaaaaagaggtgataagaatgtaaacatcaggttatctcctattcctgagttataaaaaaaactgaaagatttttctatttttcaaacccaggctttttcaactacctccagccatggaggagaggtgagggctgggatgtgcggttaaaccctaaacctgataagagtgaaagtgggatacaatctgatgagatcgagtgcattcagggtggtatggctgtagataggatacaacctgtaattctctttcttctctgtctttgtgttaagtgagctgtttcacctcatccctgggggaagcagatagaacgtggtaaagtagcaaggtctttcctagcttggagaccttgcactgtatcttaatttctgaggggctcctattcaaacctcacttttttctctcagtatgtggctcccccttctgagctcaagatctgaagatccattcagtcaggttggaacaataataggtcagtgttaggttctagtttctctctttagaaatgtattcttgtctcaagggtagcttgtatgtttgagacctagaagtccacttttgactgtgcccttgcaacttttaatattcttgaaattcttttgggcgggattcttgtgacccattgccacggagtatgcaccttttaccaaacattgagatgctgtgggtggcatgttaacataaagcaaaaatacatacaatcttaggtattccattatataactaacttaatattcatttatatcacttttctaatgccatttcaattttgcagcaacatataagaatccggaacttgatcgaatagccactgaagatgatctggtagaaatgcaaggatataaagacaagctttccatcattggtgaggtgctatctcggagacacatgaaggtggcattttttggcaggtaattatttattattacttctaagattagtttccaggaatcagctttgtgtctgatgtttcaacaagtaatatttctcccatcctcccccagccccgcaagtttctgcctgtgttgaatgttaaagctgttagcatgtgaaagaatttgtgcattttacctcctggtataaaatgaagctttatgaaagtcaatcatatttttaccttttaatgattctcatctctaagaattggcttgtagacagttttaagaatggaaatatagataaatgataagcatactttgtgttttactcttttaagtttacttgattatgtgaaagtttcagaagctaggatgaaatcacttttgtcatacctagacaggcctagaaggaaagaggctcttgtctgagataactatttccaaggactttctagaaattctttcaaatctcctgctttgataagacttatcaataaacatactttaggactgccttaattcagataaaatgttttcaggagagttcttgcccagtaatggcatctccgccaatgaactgacaataactggcgttgaacctctggaaccaaataactcttgtttctaggcagcttatgtaaatctctttttgctaatagaaacccctcttaccctcactgaatgcactggtatgccattccatgcattccagattataatctttatttttgattcccaagtaaactcagcattttttttttccccctgagagggagtctcactctgtctcccacgctggagtgcagtggcacaatctcggctcgctgcaacctccacatcccgggttcaagcgattctcctgcctcagcctccctagtagctggaattataggcgtgtgccaccatacctggctaatttttgtatttttagtagaggtggggtttcaccatattggccaggctagtcttgaactcctgacctcaggtgatccacccgccttggcctcccaaagtgttggaattacaggcgtgagccaccgcatccagcctaaatttttttttttttttttgagacagagtctcagtccgttgccaggttggagtgcagtggcaccatctcggctcactgcaacctccgcctcccgggttcaagcaattctcctgcctcagcctccctagtagctgggactacaggcgtgtgctgccacacctggctaattttttttttttttttttgtattttagtagagatggggtttcaccatgttgcccaggctggtctcgaactactgagcccaggcaatccgcccacctcgacctcccaaagtgctgggattacaggcgtgagccaccgcgcctggccccagcataatttttatatttttattagagatagggtttcaccatgttggccaggctggtctcaaactcctgacctcaagtgaaccactcacctcggcctcccaaagtgctgggattacaggcgtgagccactgtacctggctaatttagaggtgattttctttagtgtctttcttaagtttgacaattatctggattatggcggggagaaaaaggcagtgatcaggtacgtcttccaaaattttcaactccatcattcctagagggagagtaggaggcgtacattggtgtaacagtccagagtgatagggtgatctctgccacagcttatatgcaaagacaaatgactagctccataactggttattcagctatctgtgctgtgtaccaacagaggcatttatttactaaataacttcataggccttctaagctattttcccatcgtagggcttttgcccttgcaattccctttgcctacaactcacctttccttgttgtagctacgtctagtgccttctcattcttcatatttcatcctaaatgttactaccttggacaccttctctgaccaccctatctaaattattccttctcagttattttctgttaaagcatcctcttaatgtctttcaacacttttcacaaagctcttattttatgtttttattttctgcttctcccatttgaccatattctcagggccttacacagagtctggcatgagacagctccatttaaaaagatcctacttcagattagggtggagtaggaaggaagagcctcctgggaaggtgatgactcaactgtcctactgagaatgagaaataggtatagctttggatgtgaaaaaggtccaaaagctcatttcttgcagaaagccataaatagaaaggggtagggagaccacagtgtgtttggagaactcaagtagttgaatttaaggtgttacgaaacaatagcaaaagaagagactttgtaagcaaaagtcagattgtaaaagaccttgtattaatatatcatggtaaggcgttctgcattcttttattttggaaaatagtcctgagaggattggatgttacaattataaccttagatataatggggagaatgaattgaatgagaacaggggtaggaggcagttgtgataatgttaccagaaaggggccccactcctaaccccaagagagggttcttggaccttgcgcaagaaggaattccggatgggtccataaagtgaaagcaagtttattaagaaaataaaggaataaagaatggctgctgcataggcagatcagtcccgagaactgctgctttggtatttttatggttatttcttgattgtatgccaaacaaagggtggattattcatgagttttccaggtaacgggtaggcaattcccagaactgagggttggtacctgtcccccactttttctttttttgggagacagaatttcactcttgtcacccaggctggagcgcagtggcgtgatcttggctcactgcaacctctgcctcccggcttcaagcgattctcctgcctcagcctccctatagtagctgggattacaggagtgcaccaccacacccagctaatttttgtattatttgtagagatgggatttcaccatgttggccagcctggtctcgaactcctgacctcaggccatccacccacctcggcctcccaaagtgctgggattacaggtgtgagcccccgtgcccagctggtacctcccctttttagcccatatatgcatccattctggatgttgccatggcatctaaactgtatgtattatatacatataatatatatattacaatgagcagtgaggacgaccagaggtcactttcatcgccatcttggttttggtgggatttggccacttcttttatcagcaaggtctttgtgacctgtatattgtgccaacctcctatctcattctgtgacttaaaatgcctcatctcctgggaatgcagcccagtaggtctcatcctcattttaaccagcccctgttcaagatggagttgctctgcttcaaacacctctgacagtagtataggcaggaaattgtgtgtgtttaatacaactatatatattcaagtatagttaccaaaaaggcagttggaaatatgagacttggactagggagaattctaggaaatttaggaattattggcttatgttggtgattgagatcacaggagttgatgagatgatccagggagagtgtgtaatgaaaaacaatgacagcactggggagaggaagagggactatccatggaaatgccagccaggggccaggcgtggtggctcacacctataatcccagcactttgggaggccgaggcaggtggatcacctgaggtcaggagtttgagaccaggctggccaacatggtgaatccctgtctctaccaaaaatagaaaaattaactgggtgtggtggtgcactcctgtaatcccagctacttgggaggccttggcaggagaatcacttgaactcaggaggtgcaggttgcagtgagcttacatcgcaccactgcactccagcctgggccacagaaggagactccatctcaaacaagaaaaaaaaatgccagccaggtaaaaggaaaattagaaagcattggtatggtataaaaagaaatatatttgatctttgtcccattcttgtcacagagcttctaaaaccataggaattccctgagtgattggagtatcttgttttcataatgagccctttttaatgacaactgaatttatgctaatgagtggtttagggtggggtgcctagataacctcagagggtgaccagtcacctgaaaggttaagtgatcaggggattagaggactggaactttccttcccacccacccatttccaggaagggtgggggaggacaggctgaaaattaggctttatgaaaactcttgaacatgattggacttccaggtaactaaactcatggttacgctgggagagtggcatgctgagagggcatgaatgctcaggcatctcatctgtgtcacttacaatatcctttataatgaaccagtaaatgtaagtatagtgcttccctgagttctgtgagctattctgacattgaaccaagatgggaagaggtagaaatgaatgataggacacccagttggtgtttgctggagaaccacttcatgcatgtggaaaaatccccatatatctagttatgaagtgttctgtgttgattttgatagtagaggagaaaaagtttctatttccacagttgttttttttgttcgttttgggaaggcagggtgacagtgtgtctcactttagtatgcataagaatcatcccaagagcatccccagagtcttgattctttaggttcacagttcacttgaggaatctgcatcattaatgggctccccagatgattcttatatggggtggagggacccaaactgtaactataggaggtccatcacccaatgtatgcagcaagttgatatgctgagacaccaggttgcagcagagaagaggtttaatcgtagggtcaccaaatgaggagatgggggggaaccttaatccatctccccaaggaatttgaggttagggtttttaaggtttttggagtacccaaagtgtagaggtcgttgattggttgcaacttgcagagtgaagtcatgggacagggagataataaggctaggctgtattcgcatgctgatccatatcattcctctgtggggggtcttcaaactggttgctggatctgggggcccaaaaaacatcttaagctatccttaaaagtgttacgattctaatgtcagagctcctgtctatagaaagaatgggggtgcaaatggtcagtatctggtgttacatgacatttagcaacaaggaagtgggccaaagtgcagcctgattattaatgagctacagccatatttctgtccagaccccggcatgtaattcttgttaaccctatggggatggtttcagaactactcttgaggatcactgcaaggcttcatgaaatgtccagaaagataaatcttaagagagatcctaggcatccttgcaggatgtggtatattggcaatagaagccaatgttgagctaatgaaggcaagaaggttccctgggaagggagttgggaatgatatccataacataaagaaaagttctttccctcttatgctaaaggaaagaggtaaaacatatgccgaaaagataggatgcttttgcagtgaaccaaaaggctcccagtgatatctgggacttgggttgacttaatggaaagcaagtccctgaagtgagtgtgagttctttgcatttcagagccatcaaaagtgtcctttttcctatgactgcataacagattacccaaaacttagcaacttaacagccattttattatgttcactgattctgtgagtcaagaatacagatagggcacagcggggatgtcttgtctttgctccatggactctggagccttaactgagaagatgtgaagattggggtggctcaacaactgatggttgaaatgatcttaaatcttcactcacatgtctgggacctgggctggaatgattcaaagactaggactgttgagtagagcactactcagagctctccatttagcttgacttccttgcagcacagcagactcggggtaagtggactttttacatggcaaggctccaagtgcatatattccagggaacaagatagaagaacctgcattgtcttttatgacctagtcttggaagtcacccagtgtcactcattttgttttttttttttttttttgagactcagtctggctctgtcgcccaggctggagtgcagtggcgcgatcttggctcactgcaacctccacctcctgggtgcaagcgattcttctgcctcagtctcctgagtagctgggattacaggggcccccccaccacacctggctaattttttgtatttttagtagagatggggtttcaccatgttggtcaggctggtcccgaactcctgacctcaagtgatccacccaccttggcttcccaaagtgctgggattacaggcgtgagccactgcgcctggccacccactgtcacttctgatgtgcattatttgttgaagcagtcacaaaccagcccagatttaaggagatgggatattagaccccatcttgtgataggagtagtgttgcagaattttgacctgtgatttcgaattgccacaaaaagcaagaaagaaaagttgaggatactactgtgagaaaggtgggatttgtcttcttgcactttattttttctgaaatgtacattgctagtatttgtgtaagccaagtggttaatcttttcataaaaatgcagtcttaagaaatcttaacaaaatttggattttaaaaaagttgatattagacccagtgaaagaactactttttttactgttatgttttgtttttcatgattttgtatattcttcaggacaagcagtgggaagagctctgttatcaatgcaatgttgtgggataaagttctccctagtgggattggccatataaccaattgcttcctaagtgttgaaggaactgatggagataaagcctatcttatgacagaaggatcagatgaaaaaaagagtgtgaaggtatgatctttaacctttagcagaataatatacctgaaacaatgtcctgaacttattctttaataacatttttataagatgtctgcatcgctgacatcttataaaaagaactgttaatatttttctttttttttttagacggaatttcgctcttgtcgcccaggctggagtgcaatggcacaatctcggctcaccgcaacctctgcctcccgggttcaagcgattctcctgcctcagcctcccaagtagctgggactacaggcgtgcgccaccacacccggctaatttttgtatttttagtagagatgggggtttcaccatcttggccaggctggtctcaaactcctgacctcatgatccacccacctcggcctcccaaagtgctgggattataggcgtgagccactgcacccggcctttttttttttttttttttgacactgagtctcactctgtcacccgggctagagtacagtggcgtgatcttggctcgctgcaacctctgcctcttgggttcaaatgattctcctgcctcagcctcctgagtagctgggattacaggtgcgcaccatcatgcccagctaattttcgtactttttttttttttttttttttttattagagacagggtttcaccatgttggccaggctggtcttgaactcttgacctcaggtgatccatccgcctcagcctcccaaagtgctaggattataggcatgcgccaccacacccggccaaaaagcactgttaatatttctaactttgaaagccatcactaagtattttgagtactctaaatttttttttcacttcataactaaattagtgaaaaaataaaacttgtccttaatttaaaggtatattagaattaacaagttttttaaatctacccttccagtgagactaacattattttagttatttatttgtttttagatggaatcttgctctgttgcccaggctggagtgcaatggcacgatattggctagcaacctccacctcctgggctcaagtgattctcctccctcagcctcccgagtagctgggattacaggcatgcaccaccacacctgcctaatttttgtaattttagtagagactgggtttcaccatattgcccaggctggtcttgaactcctgacctcaggtgatccacctgccttggcctcccaaagtgctgagattacaggcgtgaaccaccacgcccggctgagactaacattattgaagtgtatcattgctgtttaatcgtgtatcattgctgtttaatctcaaatttgtcccaccttggcctcccaaagtgttgtggttacagacttgtgccaccatgcctggcctccgatttgtctttttgaaacagaattgcttaagaaattgggccctggcatctgtttttgatatgtatctgtgtttttagaaactgtcttacctcaggattatgtagtaagtatatttatgaataaatattttaactttatcagatgagggccaatggcaattccctacctttcataaatttctcaattcagtgccactccttcagccaaaaaaaaaaaaaaataaaaggaaaaacaaattaggatgcaaaatgttgactctggactgaaagcagttagttaaggcactgtttctcattgtggttactttctcttgagtctaaagatctcttccacaaacacaaaagttcagtgcttgatgatccatgctattttatttcttggtaaagtcatgggtggttcttctttgtgaatttgctctttgatgtaaatcaggtaactcaatctgtaagttttagaataagcatacccttcagattagttattagaaaaatgagatgatgtttatgaaaatactattcaaggccgggcacagtggctcacgcttgcaatcctagcacttgagctggtcggattgcttgagaccagcctgagcaatatagtgagaccccatctctacaaaaaatacaaaaattagccaagcatagtggcgcatacctgtagtcccagctacccgagtggctgaggtgggaggattggttgaatctgggaggttgaggcttcagtgagccgtgatcactcagcctgggaaatggagcaagacactgtctcgaaaagaaaagaaaatactaatcaagcttttaattcatataaatgaaggaatcactgttgttttgtgattaagatttttagcaaatcaaaattcaaacttctcgtgacttcagagtctcaaagtatgctgttattttaaagaaatcatctctcattttcctgatccatgctcttccagtcctcttcacactcttttcctcctccttattttagattcaggggttggttacatgtacaggtttatcacatggatgcattgtgtgatggataggtctgggcttcaactgagcccgtcacccaaatagtgaatgtagcattcagtagtttttcagctcttgtcaccttccacctttacccctgtagtagctcccagtgtttattgttcccatctttatttctgtgtgtacccaaatgtttatctctcactttttttttttttttggagacagagtcttgctctgttgcccaggctggggtgcagtggcgtgatcttggctcactgcaaccttcacctcctgggttcaagcaattctcctgtctccgcctcccgagtagctgaaattagaggcacgtgccaccatgcccagctaatttttgtattttttgtagagacagggtttcatgatgttgtccaggctggtctcaaaactcctgacctcagttgatccacctgcctcggcctcccaaagtgctggaattactggcatgagccaccgcccccggcctagctctcacttttaagcaagaagatgcagtatttggttttctgtttctgcattaattgacttaggataatggcctccagctccatccatgttcctgcaaaagacttgatttcattcctttctatggggtgttaaaagctatgtaattttaacctgttttaataatgacatttcttctaatgacatttcttccatatgactaagtgatacacatttatttcagtagaatcagaaaatacaaataggcaaaaagaacagagactccagaacttatatacttcacaaaatcagtatcaggagttgcttagaattctgttgctggagttctttttgagggaaccattttttttctacttggaaatttaaaaattcaggttctcaagattgctcagaaggttttatttcagagttttaccttttatatacctgttttgctaaaataaatgtaccacaatgtttttaatttttattgaattttattacaagtggagtttatttttttcttttcctcctgctttagacagttaatcaactggcccatgcccttcacatggacaaagatttgaaagctggctgtcttgtacgtgtgttttggccaaaagcaaaatgtgccctcttgagagatgacctggtgttagtagacaggtaaaattacatgtggattgcattttctctggaagtttatttaatagtataatactgcttactttagcatatggtataaaaaattacaacattcagttgccattttgttctcattagctagattaaggaagagatatggtattggttttattttataagttacataaaagcaccaattcatcactctgattccatttcaagaaattttaaggatggccactttttttggccagagtgcagtgccgcagtgccacgatcttggctcactgcaaccttcgcctgccgggtacaagtgattctcccacctcagtctcctgggtagctgggattacagacacacaccagccacctcacctggctccattttgtttttgataatggattttccttttaaatggaaatgagtgtttcaagtaatccatagaaacagaggagagagaagatgttcatgacaccaagatatttggtttaaatacaatgttaactagtttagctttatttcatagccagattgtatctatgacccagtcagtcaagattgacagttggatagatacaagaaaatatgaatgagatctagtatttggtaccaaaatgggtaacggtagtgaaaaataattgatttttatttatttttttgagacagagtctcactctgtcacctaggctggagtacagtggcgcagtgtcagcttgctgcaacctccccctccggggttcaagccattcttgtgcctcagcctcctgagtagccaccacgcctggctaatctttgtattttttggtagagacggggattcaccatgttggccaggctggtctcaaactcctggcttcaagtaatccccccatctcagcctcccaaagtgctgaaatgacaggtgtgagctgccgtacctggctgaataacaatttaattgtacatttaaaaataactaaaagaatataattgtattgtttgtaatacaaagaataaatgcttgaggtgatagatacctcgtttaccacgtgatttttttttttttcggaggcagggtcttgctgtgttgcccagtctggagtgcagtggtgggatcatggcttattgcaaactccgcttcccagtcttaagcaacccttccacctcagccaccagagtagctggggctacaggggcatgccaccaagcctagctaattttttttttgtgtatgtggagtcagggttttgtcatgttgctcaggctggtctcaaagtcctggactcaaactcccgccttggcatcccaaaatgctaggattataggaatatgccactgcactcagcccctgatgtgattattacacattgtatgcttgtatcaaaatacttcatatacctcataaatatgtatacttaattaatatatacccataaaaattttaaatgaataaattttttaactttttacaaatatttattgttggcaaattcttcactgcagctcctagtacagttggtatattaaatttatatttttttatttgtgtttataagtgcttaaatcatctctgagccatactggatatagctgcttgaaccctcattgtttagtatctattagcctagttttatatttcagccatctaaagcataaacattaaaaagattgaaatattgagcatgttatttgctttgtcaaagatcactaagttaaaatttcctagacttcttacagatgacagctggaaatcctggtttttaaacttcaaattatatataaaagctgaaaaaattctgtaacccaaattttctttttaagaaatataatacaatttttatttcactctcattagtccaggcacagatgtcactacagagctggatagctggattgataagttttgcctagatgctgatgtctttgttttggtcgcaaactctgaatcaacactaatgaatacggtaggatttaatcatattattgtgtttcgatggtaggaaatgaaatggtatctgttttaattctgaaaagcaagggaaatccatatcgtggattagaaaaaacttctaaaaacaggcatgaatgaaggggtttgtgttttcatagaaccagaagggctgtttctagtctttctatagtgtgtagttccctggatttctctagcagtatagggcttgatggttctagcttctggttatttgtcagtctcagggaaaatgagtgccagaaattttaggatgcttatttaagtctcttgaataaagtataaaccactccttccttctgccatctatcaggcaaggctttttatattttcagtattgtcagctatttccagcttcaccagaatatactccaggtttcagcttaactgtgtacactttaagctgctgtcagacttagaagattatttagccagatgtctggagccagactcatctgaaataaactttccagagtttaggtaatctaatattcaaaattataacatgattttttaaagttatcagtttttttcatctttgaaagtttaatgctcatagagtgctttgggatcctttgtcagtggtgttaattactgtttaaatggttcagactttctcattaaaataaaatttcaattataaatgtaaattatagtgaatgtactgtggggttttttttgtttttcaggaaaaacacttttttcacaaggtgaatgagcggctttccaagcctaatattttcattctcaataatcgttgggatgcctctgcatcagagccagaatatatggaagacgtaagttgttatttttttttttgtaggttttgaaatacagtcacatacattgttatttgagaaaacaatattgcttatagaatagaaaattataagagctattccatgaaaagaagatagttagagaaaacctgaagtaggtatgtgataaagaccaaagtctgaagttactttgagggaaaattgtgttatactatctagttatttcaaagcttgaaagttcttttttgtttaagttgttattgaaatgtacataacagaaaagtacataaatcgtaagtgatccttccagtttggcttcctaaagtgctgggatgacaggcctgagccaccatgcctggccaaattttacaaatttaacacacctgtttcaaaatccagatcaaaaagcagaccattctgaacaccccagaaccttcctcttacctacctccttctaacttcccttctgtcctacttcccaaggagaaattatccatttatcatgacttctgaccccctaaattaatctttctggttgttcaactttatataacagaattatataatacctgctcttgcatctgtttttgtttttatttaacgtgtttgtcatatgtgtccatattattgtgcgtagcatagttgtattgcattcccattgctgtatagtattccatctgtgactatactacaattgatttattcacagtgatgggcatttgggttaatttactgtattcagttatgaatgctactgtgcatatgcttgtatatgtccttctggtatgcatatgtatgcatttttgttaggtagttctcagtgtggaggatggacagttttgacctcaatgggatatttggcagcatctgaagatactttttttttgttacaattggggttttgtgctactggcatctaatgagtagaggttagagatgctgttacacatgctctgacacagaacaggcccccaagcaaacactggccaatccaaaacgtcagtaatgcagacgtcagtaaaccatgggtatatgtacttagaggtaaaactgctagattacaagttaagaatatgttcgattttagtaaatatatagcaccagagttctccaaagtgcttggtgtcgatttatactcctgccagcagattgagtttcataagatttgcatcctcaacttttttttttttttggcattttagtcacaccaattgtagaaacttaaaaagaagtatctggaatttgaactataaataatatttatttaatttgcttgagactatttctgattttaatagtagtacgagattattatatgtagaggacaagataaaaataacttaaactatcccatcactgttcacatgataaaattatttgctttcatttttccccaattggaattttgcataacatcatgttttatatcctcctgtcattaactgttgtcttacagtcttgctctttcaaattggggtctcagaattaggaagcatcactcataaattatttttccttaaatatttcagcattcctatttagatttatttttgcaagtcttaatatagagatctctcatcatagccataatactaaagactagtactaaatcctaacttctaacccttaatcttcacttcagtgcccaagtggtaatcttgaacccaacattgcaattctaatgcctggttaatgcattctacccaaccttaactccccaaccttaactttgttttttgagacggagtcttgctctgtcacccaggctggagtacaggggcacgatcttggctcactgcagcctccacctcctgggctcaagcgactctcctgcctcagcctgcccagtagctgggattaccggcacctgccaccacacccagctaatttttgtgtttttaataaagacgaggtttcaccatgttgtccaggctgttctcaaactcctgacctcgtgatctgcccgccttggcctcccaaagtgctgggattgcaggcgtgagccactgtgcccagcagaattttaaatagatgttcaaaagacagaatcgttaagagaaagatttcctgtcatcaagtatcaaacttcatttattagaatttcttaaattcattagttatatggtaacttttattatatcactgtgaataaagtaagtattggtctatagtcgttggttattatatttgtttaaattattagaattcttttaataccgttttctctgtaggtacgcagacagcacatggaaagatgcctgcatttcttggtggaggagctcaaagttgtaaatgctttagaagcacagaatcgtatcttctttgtttcagcaaaggaagttcttagtgctagaaagcaaaaagcacaggggatgccagaaagtggtatgcattacctatagatttcctgtttaaatataaaaatatttaaaattggctgggtgcggtggctcacgcctgtaatcccagcactttggaaggctgaggcgggcggatcatgaggtcaggagtttgagaccagcctggccaacatggtgaaaccccatctctactaaaaatacaaaaattagctgggcatggtggtgcacacctgtaatcccagcttcttggggggctgaggccagaaaattgcttgaacccaggaggcggaggttgcagcgagccaagattgcgccattgcactccagctctgggcaacagagcaagactctgtctcgggggaaaaagtatatatatatatatatatttaaaattataaaatcagtagcctaccagaaaacatatcttgctacatactaggtttttaaatctttgcctgtacgttacaggtgtggcacttgctgaaggatttcatgcaagattacaggaatttcagaattttgaacaaatctttgaggtaggaattttgtgattgtattgcctaatacaaaactctttctttggttggagaaagcataatcttctatttttatcctttgtctttgtcaataacttttgctgttatttagtttagttactgacacagccagtaaaatgtggaaagtgaagaaaaggagcccctgcaaaatgatttgtaagaattgagaattaaagattgtaatttattccttattcttatttttatgtattttatataaataagaaactgtgtttcaatattgctgtgttgtgcaatgaatgaaattccctgtattcaataatttggaacaagagtaaacaagcgtaattgctgttggaatggataatagagcaaagtaagcattatccttttttactttgtgccgcatgactaatagaagtatacaaaacatgattaatgccatttgacaaaattttattatatttatatactgtgttaccacatgtccattctccatattttgtgccaaacattctaaatgaataattgagtagaaaagagcttcagcgttttcagaaacttctaggaaactattgaagtgcctgagtggtagatggggagggaggctagtttcttatgttgcattgtaagtgtttttattcagagacattaaaactcaccctacatttgactgaatagttctttagatattaaccttctgaacccctattttgccctgtataattcatatcaccttcccacttaggaatgaacacagtgacttcagcattgaagaaacctcagtctgtaattattcttataagtagtaactgctttaatgtaaaggggacatgaatgttgagtatacttggcaggatttttaaaataaaaaatgtgcttactatctctcatctttaatttggtgagagaaaaaaggttattagacagatgaagacaaactggaagaaagcaaatccactgccagctatctcgataagatctaattgttcagaggctactggattatcagtagatgtcctctcaagccaagctataggatacgtgaagtccccgttactcaaagactattgtttgttttttttcttttccttttgctttcaccaaagggttgatgctctcctcacctcttttttctcttaaagaaatgggatctccctctgttatccaggctggagtgcagttgggcaatcatagcgcattgcagcctcgaactcctgggctcaaatgatcctcccacctcagcctcctctcctcactgttatcagttatttcatccatggggaaaatatgtagggagaggatctattctacttccttgtctttatttactgaccttagtatatatgtgttttatgtatgtttatcattgatttcttctaaattatacatttatataatgtataattgtgtaatgttctgttacacatttatactgcttccatattggttcatggtatagcttgtgcttcccaagaatatctcgttgaggaggtgggaatgagaagaataagatatgctgtagggaattggttcataagcctagctgatcatcagaatcacatgacgtgctttagagaaccacaggctcctgacctatcctatccccaaccccagatccagggggttggggttggtctaggaatctatatacatatatattcaaagttccccaagtgattgcaataatcagacagacttaggaactattctttttaaatgtttttagaggaaacttggcagtttatgttttattctaatggtccatttgggattctaaaatttatgtatggaaaaaattgcttatgagcagtagctttttgtttttacttaaagtcatggaatgtccagctttagagtttgaaaattttaagtctgaaatatctaaaatgagaatcagttaaaaattatttgaatttttccaaacaatcagctgggcaaaaaatattatgtctgaatgtattaaaaagagacaaaacattttttgttaattaattacattgaaagttttagtcagctttattccaaaactggtatttgttacttcttaagtcagttttggtaatttctgatttcttagaaattggtgtatttctgaacatttataatttagtagcataaaattgtttgttttgaatctcttgtttctcacttctatatttaaatataaatatatatctacatatacatacacacacagacccttaatgggtttgccaatgatttatcatccaaagacacagccccagctcttatgtaatttatcacttaataaatatcatttttggggtttcattcactaagttctttttttttttttttttttttttgagacagagtctcgctctgtcgccgccaggctggaatgagggagtgagtgcagcggcgcgatgtcagctcactacaacctccggctcctgggttcaagggactcttctgcctcagcttccctagtagctgggactacaggggcacaccactacatccggctaatttttgtatttttagtagagacggggttacacagtgttggccaggatggtctcgatctcctgacctcatgatccacccgccttggcctcccaaagtgctgggactacaggcgtgagccaccgtgcctggcctgtgttcgtctttaacattgtttacgttgaagatgcattggtttttgcttattcttaaagaaaagattcaggattgtgaatttgtgactgcagctttaggcgtatcccaaggttttcagtactagtttagtttttgttgtttttgtttctaattatccttttggcatttccttatcaatataagactttttaaaattcaagtgttttgattcattttatccaatttttggttactaatttcttggtttctttgtgttgtggtcacatcatgtggcttttacacacattttctctgttttggggatttgcttacttttttttgtagtcgtgcaagattttttgtgaaaagaaaaactgtatcaagttcatcacctttatcaatttgacctgtgccgtgaacttctttagattcatttgattcaaatggatctaagtattttaaacatttagaatactaatttaagcaaggcttgaaaattaaatggagtaaaagcaataaaaaaaatcaatattagcctgggcattggtggctcatgccagtaatgccagtactttgggatgccaaagcaggaagatctcttgagcttaggagattgagatcaggttgggcaaaaacatgaaaagactaaatcacatctctagcaggaaaaaaaaaaatccagatatgatagctcatgactatagtcacagctaccccagaggctgaggtagaaggccaagaagtttgaggctgtggtgatggtgagctatggaggtaccactgtgctccaacctgtgtgacagagtgagactctcttttctttcaaaaaaaaggaagaaaggaaaatcaatgttagtctgtcaatacattttcttattgttttaaaactgtatttggaaagtttcaaaatgcatttggactgcattgttctaaaggcaagttagaaatccaaatatcttttgcacagttatttcaccattaattcttactagttttggttgtatgatgggagatagacgtataaaaataacttatttaaaatgtcagtggatttttttgtaatggacattcctggatgataggtgaaatttgaacatgaactgtttgttagataatagtattgtctcaatggtaaatattctgaatacaattgttttgtgattgtgcaaatgttttctttcttagaagacaagtattgatgtgttaggtaacaagcttgtgatgtagtaatgacctgtcaaaatgttcaggaaggaaaataatacataagtatatataaaaatatatgcctctctttatatatatgggggtcatacattttatatattcattgcaagacatgtattatatatattatatatatttattatatattatatattatataatacatatataaatattatatataatgttatatataaatattatatatatatgccctcacacaggagagagagtatcgagcgcgagtatggagggaggggagaagtaaacaaaaggggctgaatgttaatatttgatatatctagatgaaaggtctatttcttgcactttctattgaaagtatatcaaaataagttggcagtgatgagtagcatgttaggtgtttgtagggtctgttttcaagggaaattgacaagtttgttggttttatgttttaattacatatataaatttatattattaatgtatgattagagttcctgataaaataaatctgggaactgctgcatattatatatgttccccatagagattaattagcatattagtgtagtaaggatgctgagaaataacttagaaggggaactttatttaaattaacacttcccatacttatttggagtaaaatgttcttttttcaaggtacctcttaaatatcctacagatcagtgggaacaccaatgtgggattactttttaattgattattttcttctctatacttactcatcattatatatttttgaatcagacagtaacttatattgcctaataacttttggagatcttttctgtctcgtctagctctaacactgtgctgttatctacaaatttggatcttcattgctgatatctagatctgcttcatcgaggaatatagactttattttaatctttttccttttaaaaatatttttgtttttataattttgcagaagttaatttgacacatttatgaggcatttatttaaaataaagtcaatgcattattttagttattaaaaaataagtagtttacaaatgttcactattatgtaattattggtgattttaaagaagaaaacatccgggtatgttttatctttaggtgtgtacagaacaggaatgctataacttcctacattaattttttcaaaatcagtgaaaataagtgatgcataaatgagcttcaccatgggaaaaaatgaagctaggcaatgcaagaaagtaatggcttcagagttaaatattgactaaattaattaccctcatgtgctctatagctaaataatctgttttgttttctctacctcaaacgaaatgctgaagaggggagctaaaatggcagtagagattatagtctttctgagtgctcaaataatttcagagacatgaaggctaagcataggtcgtaaataggacattgaatgcacgtgtagcatcctgatgatttcaggataagaaatgtagcactagagtattaagtaaatgccttttgaagcctaaaagccatttattaaaggaaggatagtaatgaacttcaggaagcaattaccacaatttgtattagctaaatatatagaggttcgagaagatgaattcattggagtatcagagaattaatatatccctaatttttaaaaaatttatcatagaaaataaacatgtctcttataaaacatctatagtacttactgtgctatatttcagtgcagaatttgactttctgtgaagtaaaaatgaaataagacaaattgtaatataaaaattttataaatttttatttatttattttttgagacagagtctcgctctgtcgcccaggctggagtgcagtggcgctatctcagctcactgcaagctccaccttccgggttctcgccattctcctgcctcagcctcccgagtagctgggactacaagcgcgtgccaccatacccagctaattttttgtatttttagtagagatggggtttcaccatgttagcctggatggtctcaatctcctgacctcgtgatctgcccgcctcggcctcacaaagtgctgggattacaggagtgagccaccacgcccggcccaattttataaattttaaatgataaatcatagtaaatatatatttataggatgggcgtggtggctcactcttgtaatcctagcactttgtgagactgagacaggcagatgacttgaggtcaggagttgaagaccggcctggccaacactgcaaaaccctaactctactaaaaatgtaaaaattagccaggcatagtggtgcatgcctgtaattacagctacttgggaggctaaagtaggagaatcacttgaacctaggcggtggaggttgcagtgagtcgagatcatgccattgcactccagccttggtgacagtgcaagactgtcaaaaatatatatataacatatataacatatatatgtaatatatatataacatatataacatatatatgtaatatatatataacatatataacatatatatgtaatatatatatataagataacaagtattctatatattgaaaattgaaacaaatgtgaaatgtatccattgataaatgtgatgcattgtgacgtattttttatttaaataaacactggttataaaacactgatttataacaactattttaaatgggttgttagcttgaagataaatgagatagggcatgattcaggtttctgtgtacacactatattctaatgaaagtaattacaattatcttctaaacagctgcagatattttttctataaacaattttagatgttacattgttaaatgttagctttcaaattcttcacattttaactcaatgaagtcctttttagcaaacttacaggaatcattgtatcattcagctattaaataaggaattgttctaattcacatcttaattaagaactttactaggttatatcttttgcaagtatgagaataatctagatagaaggactagaattggattaaaggtgatccagataaaaatagtaattctaatgaggaaattttttaacattgaaaatagtaccctgtttattttttttaatgttagagtcaaaccattgcacattactgtgtaaaaatacacaaagatggtaacttgctgctaaagccctttttacttttgaatctttgtatttttttcacctttgtaattttaagttgtgcttttatcactcatttgttttctatctttatttctgtttgggttaaagttacaaacagcaagtttttgtgtttaaattcctgaaaatgttgcgatggaattacagtaatgtgttacggcttgggcccctcgcaggagtgtatctcgcagtcagcagtgaaaacaaagttcgaacagcacactatcagagctaaacagatactagctactgtgaaaaacataatggattcagtaaacctggcagctgaagataaaaggtatgagttcattttgttgcaacataaaaatgttagtttttttgtcagacttttgttaagatgaggttttaaattgttgtactataaatactttttacactgaaatcaaccttgtgggtttaactgatgcctacttctatatttttaagtgcgtatttgaaagtgtcgatatttattctgcaaccttgcacacatcatttatatcccctggacctcactattcctgtgtatgaattgtgatttttaaaatgttttgtggctttaaaatatctttgaagcagtggaagaaccatttcttcaagcagatttttatgaagaagtccaaaacaggtgatcctctttctgcattcaacccacgacccattttttaatatggtcatacattggtattttgaaatcactattttatactagttgtgtttgtttattgcctggtgaacaaacaaggcgatgctacctgccaaccagaaagttgatttggtaagcagtaccctttatgttatactgtacggcattattttatactatttgttaccttgtaaaggtggcaatgaatacatgaaaataccagcattatcgatacaaagtataattttcacaaacttggtatgcttgaaacacagatcgggatgttattagatgtgacaaaagtaatgatgttaagcctcgataggaccttcagtggacttaagccagttgaaggaaacataaacgcatcaaagcttaagtccaagatgacataacattggaattttaaatgtatttgctctttcagggaacaaagaccccttcatgtccctgtctgttgctttataatggtactttcttaggaatgaattaagttcaaatgcagagaattgccagcatataaaacgcaaggatcagaaccctgagtttgaactcagcccctgtgtacagcctccgtgtggcctctgtttaattagatcgtgctgctatagcagttccttctagctcagttgctttgatgtagtacccaaattttggcctaaaagtgatttaattagtaataatttttaaagatataggatgttgaacaaagtatagcacaaagaagatgtgatttgaggattgtataatcataatgtcctgggaacttcttaagtaaaagatcttcttaaatggatctcaggtctttattttcctgtatcagccagagttgaacaaacttttgtttaaaaaaagagccagatagtaaatattctaggctttatgggccataaagtctcttggagctactcatttctacagttttagagcaaaagcagccatagatagataataggtaaatgaatgggtgtggctgtgtttcaagaaaactttaacaaaagctggcagctggctagatttggcttgtaaggtgctatatgctgacccctgcttattaactaaagtcagtattgcattctgttttgcctgttcatatctatgaagacttagaattcttattcatcctttctgggattcaggtgccacatgggcagagaaacgtggtttctatcaaatcatctatataaaatactttataagtgaaatattacttgaatcctttgagatgttacaagttttttttttccttgagtcatgctaatagatggttcaatacatgaatgagtcccttgctgaaatgctttaggacttcagactaccctgaacgttgattactctttatactgaaataggcattattcagtggaagagagggaagaccaaattgatagactggactttattcgaaaccagatgaaccttttaacactggatgttaagaaaaaaatcaaggaggttaccgaggaggtggcaaacaaagtgggtaacagtagcttcatgattaaaataacctggatggaaattatttttgataatgctaaaaatgttattcctgttactttaaaagaatgttttcagatttttcaatttaatttttttgaataattgataatcttgtttaattattttaactccaaaattttcatattttcaggtttcatgtgcaatgacagatgaaatttgtcgactgtctgttttggttgatgaattttgttcagagtttcatcctaatccagatgtattaaaaatatataaaagtgtaagttaaagtatagataaaattattcagagacagtttcttattattctataccctcatttatttcatggtttggcatttcagtgtatcagtacaaaatgaaactgttagatctcttgtgccctcttgtaataaatgtaaactgtcttgtataaaaagtaaatagaaaatttatacttagaatgagataaagatcattttaggacgaggcacagtggctcatgcctgtaatctcaacactttgggaggccgaggtgggaggatcagttgggccccagagttcgagaccagcctgggcaacacagtgagaactctaatctacaaaaaacagttaggctggttgcggtggctcccgcctttaatcccagcactttgggaggctgaggcggacggatcacgaggtcaggagttcgagaccagcctgaccaacatggtgaaaccctgtctactaaaaatacaaaaaaaaaattagccggtggcaggcgcctgtaataccagctactctggaggctgaggcgggagaatcgcttgaaaccggaaggcagaagtggcagtgagccaagatcacaccactgcactccaacctgggcaacaagagcaaaactctatctcaaaaaaaataaaaaatagccaagcatggcgacacgcttctatagtcccagttactcaggagtctgaggcaggaggatcgcgtgagcctaggaggtcaaggctacagtgagtcaagatcaaagcactccagcctaggcaacaaagcaagaccctgtctcaaaaaaaaaaaaaaagtcaaattaaaaagaccattttggcatttactgaatattttatgtctttataaaaactacatactttctggagaaaaaataatatggatatttaccattgttaacaggaattaaataagcacatagaggatggtatgggaagaaatttggctgatcgatgcaccgatgaagtaaacgccttagtgcttcagacccagcaagaaattattggtaatatttatgtctacaaggtcatgtctggtttgttttttcattcatgactggtgaagagcttattttcctttaggcattccattgaaggtaaaacatttaccattcttatcttaagtgttgtaattttgttctttctagaaaatttgaagccattacttccagctggtatacaggataaactacatacactgatcccttgcaagaaatttgatctcagttataatctaaattaccacaagttatgttcagattttcaagaggatattgtatttcgtttttccctgggctggtcttcccttgtacatcgatttttgggccctagaaatgctcaaagggtgctcctaggattatcagagcctatctttcaggtatgtatctttgaatctaccaattaagactctcctttattattttgtttatgtggtttttctataataaaactagctttacaaaatctgcacatttaaaagctagtatctatctcttagagccatttctgaggtagatatttagtttgagcatctccaatctgaaaatccttaaaggtccaaaatgaaaaactttttgagtacggtgacaccacaggtggaaaattccacaccagacctcaatgaggtcatagtaaaaacgcaggcacacaacacacagtttattcagtgtcctcaagggaaaaaagactcagcctcttctagctgcaatatatcttttccacgtatgcccaaattcccccacacaagcacacctatgaagggtactaaaatggcacatgtgcaggtccagtgcaccaacagcattttccccatgatgccccacaaggggccaagacctttgtgcattacccagtatgggcttctttacttcctgtcttttctctggtgtaaagatactgtttaaaaaaaatttttttttgagtggggatgcgtttgagacagagacctgcgctgtggctcaggctggagtgcagtggtgcaatcttggctcactgcaacctccacctcccgggttcatgcgattctcctgcctcagcctcctgagcagctgggattatacgcacccaccaccacacccagctaatttttgtatttttagtagacatggggtttcaccgtgttggccagactggtctcgaactcctgacctcaagtgatccacctgcctcagcctcccaaagtgttgggattacaggcgtgagccacagcacccaggctgtttaaaatgtttaaaaggcctacagatacccttgtgggtgacattgataagaaaaagaagaggcatttatttttatttataacacataaatttaagctgttggaaaaactggacaataatgtaagtgagaaacttcttacagaagaatgatgttggaatgaacaccatatatgacctaaaagaaagaacaactttcctaaagttgttctttaggactaaactgttgaagttccatgctaaaaatgatgacagaagttaatgaaaaaaacaaaaacactgcagaaagttaaaaacgaagatcttgatcatgcattgaaagagtggatccatcagcattgcagtgaacacgtgccacttaaggacatgctgatcatgaaataaacatctattaaaatgaactgaaaatcgaagggaactgtgagtattcaataggctggttagagaaatttaaggtaagatagcattaacttttctaaaggtttgtggtgttaaagcatcttgatcacaaaacagcagagaaattcattgatgaatttgccaagattgtctctgatgaaaatctgactccagaacaagtctataatgctgatgaaacatcactgttttgccattattgacccagaaagacactgactacagctgaggagacagcccctacaagaataaaggatgcaaagaacagaataactgtgctgggatgtgctaatgcagcaggcataaatgtgaacttactgtgataggcaaaagcttgcatcctcactgttttcaaggaatgcattttttttactagtccattattgtactaacaaaaaggcatggatccctagggacatcttttctgattggtttcacaaacattttataccagcttgtgtgcacttgcagggaagctaggccggatgatgactgcaagattttgttattccttgacaactattctgctcatcgtctagctgaaattcttattaaaaaaagtgtttcattatttcaaccttgtgaccagggtattctacgatcaatgaagagtaaatacaaaaaccttttttgggcagcatgctagcagcagtgaactgaggcctgggtgtggaaggttttcagaaggagtttagaatgaaagatgccatagatgcttttgccagcacaaggagtttaggatgaaggatgccatatatgccagcacttggaagacagtgactcagttgtgtatgcctgcagcctctgcctgtcactacatttattgatgatgaggagcaaattggtgactttgaagtatgtcaagtgagctccttatgcaaaaaataatatcttcagagtccatccgtaagctggaagaaggatatatcaaagaagtgtttgacattgataatgaggtttcagttgttcattcattaactgatggcaaaatagctaaaatgcttctaaatcaaggtgattatgataatggtgataatgaagatgatttcattgacctcgcagaacaactgcctataggcagcatggtgatgggcttattgaagcactagagcagcatgtattcataacagaacaagaaataggtttataaaatcaaggagagacttcaacaaaaaccattgttaaagaggcaagtaggtggtactgcaggaaacattttaaaaggccattcagcacaatgtcttattatgccgagaggacccacttcttggtccctcaactgcttctgatgtttcttctcacctaacaaagtactgtgtaccggaactttttaatcaaaacataacattgtaggtagagactgaaagcctgccattgttgctgtttaacagctgatacaggtgttctggtgatgccactgtgctgcttagtttgaatacgttatttttcactgttattaatggtgtgtcttatatttttactattaagttcctttgtgtgaatccgtgtaagaaaatgattgcttgtcagtagtatgtaaattcaatcaagaatgatggtgatgccaaacaaccatagagtgttcacatgggtggctgacatagcaacacctgtgttttctgataagtcagtgtacacaacctttgtttcatgcacaaaattatttaaatattggataaaattaccttcaggctatgcatataaggtatatgaagcataaatgaattttgtgtttggacttgggtcccatcctcaagatagctcattatatctatgaaatattcaaaaatcctaaaaaatctgaaatctgaaacacttctggtcccaagcattttggataagggacactcaacctgtagtatgcttaagggaaagcttatcctaaagctttcgtccaatactgttgcaggtggtgctacattcatttttgaaacatttctgttttcttaaaagatttggttttcacatttcaaataaactagcataaatacaagcatttttttaatttttttttattatacttttaagttctagggtacatgtacacaacgtgcaggtttgttacatatgtatacatgtgccatgttagtgtgctgcacccattaactcatcatttacattaggtatatctcctaatgctatccctcctccttcctcccatcccacaacaggccccggggtgtgatgttccccttcctgtgtccaagtgttctcattgttcaattcccacctatgagtgagaacatgcagtgtttggttttttgtccttgcaatagtttgctgagaatgatggtttccagcttcatcgatgtccctacaaaggacatgaactcatcattttttatggctgcatagtattccatggtgtatatgtgccacattttcttaatccagtctatcattgttggacatttgggttggttccaagtctttgctattatgagtagtgctgcagtaaacatatgtgtgcatgtgtctttatagcaccatgatttatattcctttgggtatatacccagtaatgggatggctgggtcagatagtatttctagttctagatccctgaggaatcaccacactgtcttccacaatggttgaactagtttacagtcccaccaacagtgtaaaagtgttcctatttctccacatcctctccagcacctgttgtttcctgactttgtaatgattgccattctaactggtgtgagatgatatctcattgtggttttgatttgcatttctctgatggccagtgatgatgaacattttttcacgtgtctattggctgcataaatgtcttcttttgagaagtgtctgttcatatccttcgcccactttttgatggggttgtttttttcttgtaaatttgtttgagttctctgtagattctcgatattacccctttgtcagatgagtagattgcaaaaattttctcccattctgtaggttgcctgttcactctgatggtagtttcttttgctgtgcagaagctctttagtttaatgagatcccatttgtcaattttggcttttgttgccattgcctttggtgttttagacatgaagtccttgcccatgcctgtgtcctgaatgatattgcctaggttttcttctagggtttttatggttttaggtctaacatttaagtctttaatgcatcttgaattaatttttgtataaggtgtaaggaagggatccagtttcagctttgtacatatagctagccagttttcccagcaccatttgttaaatagggaatcctttccccatttcttgtttttgtcaggtttgtcaaagatcagatagttgtagatgtgtggtattatttctgagggctctgttctgttccattggtctatatctctgttttggtaccagtaccatgctgttttggttagtgtttggtagtgtagtatagtttgaagtcaggtagcgtgatgcctccagctttgttcttttggcttaggattgacttggcaatgcgggctcttttttggttccatatgaactttaaagtagtttttttccaattctgtgaagaaagtcattggtagcttgatggggatggcattgaatctataaattaccttgggcagtatggccattttcatgatattgattcctcctatccatgagcatggaatgttcttccatttcacccattcacaattgcttcgaagagagtaaaatacctaggaatccaacttacaaaggatgtgaaggacctcttcaaggagaactacaaaccactgctcatcgaaataaaagagaatacaagcattttaaaagaaaaactttaaaaaatttatcaattcagtaattttttaggaaatttgtgaaattgtaaaaccatcaccacaatttagttttagtttttgtcacctcaaagctgttttactcatttgtagtcaattatgatttccacctccagcctcaccactaatctgccttctgtttatggatttgccctttctggaggtttcctataaatgcaatcatatagaatgtggccttatatgactggtttctttcacttagtataatgttttcaaggtttatcatcatggtatcagtgttgtaggatgtatcagtacttcatttcttattacggctgaggaatattccattatagatacaacactatccattcaccagttgatggacattagggtagtttgtagtttttggccattatgaatactgctataaatattcatgtacatgttttttatgtggacgtgcgttttcatttctcttgagtatatacgtaggttctaatgggtatagagtagtattcgttgtaggtttgatttgcatttccctaatgaccaatgattttaaacatcttttttgtgtgctcactagccatttgtgtatcttcttttgtgaaatgtctattcaaagcttttacctatttttaaattatttgggtcctatagagttgcaggatttctttgcatattctggatcaaatcctttctcacatatatgatttccaaatatgtttctttattttttgagacaaggacttgctatgcccaagctggagtatggtggtgtgatcacagttcactgccacctctgcttccaaggagctgggaccacaggcatgtgccaccacacctagctaatttaaaagaaatttttgtagacacaaggtctcactgtgctgtgctggctggtttcaaactcctggtctcaagctatcctcctgccatggcctcccagagtgctgggactacaggcataagtcactgcacccagccccaaatatatttctcttgcctgtggctgtgtgttttgaagtttaagaggtttttattttgaagtcctttttttttttttttttttttttgagactgagtttcactctgttgtccagactggagtgcagtggtgcaatctcggctcactgcaagctctgcctcctgggttcacgccattctcctgcctcagcctcccaagtagttgggactacaggcatccaccacctcgctgggctaattttttttttttatgtatttttattagagacagggtttcactgtgttagccaggatggtctcgatctcctgacctcgagatccatccacctcggcctcccaaagtgctgggattacaggcgtgagccaccgcgcccggccgaagtccttttttttttttttagtttatcattttttgttgttgtttgtttcaaggattgtgcttttgttgttagtttttttaaaaacacactttgttcctcttgagagttgagggcctactgttacatttagaccccattgtatattatgaaaatttattgttcatgatatcattggtccatattgtagataagaatttccaaattatttttattttctacatatatttgtggtgtactcatcatttagggtaatttttccctcatagatgtgctactataattttagagttttataaagataactttatagttgtttaagtgtaatcttttttcctttctctttttttttggcagctccctagatctttagcttctactcccactgctcctaccactccagcaacgccagataatgcatcacaggaagaactcatgattacattagtaacaggattggcgtccgttacatctagaacttctatgggcatcattattgttggaggagtggtaagaaacattacttttagtataattaaaatcgaaatgtttgcaaggctgcctgttagctcacaaaagaaaaggtatacagtatttacttctatttataggatctgtaaaatagtatgaaaatttgcaggttaaaagtagtgaattaaatatcacaagtttcatcttaaatttttaaaaaacatacatctttaggaatgaactatcaccacctagctggtctttaatacttcctaagcattttcacatcacagcacacaaagaaatatttgtacgttgaggtaataagaaaaccccaggtgccctatctagccttctctgaatatcaaggggatctgtcttaagtattaaatgttatttttagtagtagttcttatttgtttctttaaaaaatgtatatcattaacagcatggatatgcttgttttggtttttgaaaggtctgacctacaatatttaacattgttttatttttgagatacattgaatcaggataagtctggcagcttataaagctctccctcatttgtgtgctgatcccttttaagcctgattgatttctggtaacttcaggttttctcatggagaaggaatatacatttttagaaaatgtatctaactcaaagatccatagggaactaaaatgcttttaaatgtactctccaaagtggtgtttttccttctcagactaagctatgactttatcttacagatttggaaaactataggctggaaactcctatctgtttcattaactatgtatggagctttgtatctttatgaaagactgagctggaccacccatgccaaggagcgagcctttaaacagcagtttgtaaactatgcaactgaaaaactgaggatgattgttagctccacgagtgcaaactgcagtcaccaagtaaaacagtaagttggaaggtgcatctttcctttaaaaaaaagttactgaaatatgacatacatgcagaaaaagcacaaaataagtgtattgctcaaagaattatcacaaaatgaacatgtttcgtgatggccataaatgagaaaaaatagaacaatactaaacctcactgctgccctttctccctcctaatcactattcttctttccattctcctgatagattaggtttgaacattagaaaattggtagataggaactctcaagaactctggaggggtttaaaaagatagttcttaattttttttcttttttttcagagatagggtctctgtcgcccaggctggagggcagtggcacaatctggctcactgcagcctcgaatcttgggctcaagtgatcttactgcctcagcctcccacgtagctgggaccacaggtgtgtgccaccacaccaggataattttttaattttttttttttctttgagacagggactcaatatgttgcccgggttggtcttgaccacctgggctcaagtaatcctccctcctcaagcctcctgagtagctgagattataggcatgagccaccatgcccaactcaaaagatcttcagcagacctattctaaatttatgtacctggctgggcaaggtggctcacgcctataatcccagcacattgggaggctgaggcaggcggatcacttgaggtcgggagttcgagaacagcctggccaacatggtgaaaccccatctctactaaaaacacaaaaattagccgggcatggtagcacatgcctgtaatctcagctagttgggaggctgaggcacaagaatcgcttgaccctggaaggcagaggttgtagtgagccgagatcacatcactgaactccagcctgggcgacagagtgagagactatgtctcaaaaataaataattgcccttaagatatttgtggtttctttttttttttttttttttttttttttttctgagatggagtctcagttgcccaggctggagtgcaatggcacaatctcggctcactgcaacctccaccttcctcattcaagtgagtagctggcgtgtgccaccgcacccagctaatttttttttttttttttgagatggagtctcactctgtcacccaggctggagtgcagtagcacgatctcggctcaccacaacctccgcctcccaggttcaagcaattctcctgcttcagcctcccaagtagctgggactacaggtgcatgccactacacctggctaattttgttttgtatttttagtagagatggggttttcaccatgttggccaggatggtctcaatctcctgacctcatgatccactcgcctcggcctcccaaagtgctgggattacaggtgtgagcctccatgcccagccccttgcccagctaattttttttgtattttttttttttagtagagccaaggtttcaccatgttggccaggctgatcttgaactcctgacctcaagtgatccacctgccttggcctcccaaagtgttgggatcacaggcgtgagccaccgcgcccagccagatctttgtggtttcttaataaagaaaactgaatgaatagaggtagcctggccaagcagtctaagaaagctgaatgaattcttagcatttaacaaatgaacttaatggtaggtagactcctgatttcatggtgaatgtaatgtatatttgctctcgcagttcaaatgtatacgttaaatgctattttatttttagatctcaggagaattttattataacatatacctaagtccacccggtttctgcttttatacaacttaaatatttgtttcattcatgtggtaaaaatatatagaactccagtcaagtcagggtacaatattctgtatttggatgcctctgagagcagaatttaaaaattctttgagttcaagataacttcagtttaatggaagaaactaacatttacataattataatacaaagtgagagtgataagaaatataagagaaagagaaaccattatcataaggcaaggctgtacaagttacttaaatcatgaaggatagtagatcaataaaggtttcctaggggagatgtgtagcatatgagatttgaacatgctgtatcggaagatcagatggagacaacaacccaaatcaaaaacaagaaggtaaggggaaaagactgcattcaaagacatgaagagaaatattcaatgtggcacatgtgtatctaagctgtgtacatacattcaggtgtagacttcatagcaggatgtggccttgtctgtatgtgtagattggggtttggataattaggaattccgagagtgatgtcaacacttagttctagaacagataactttgcagtagtatttgaaattgtttagactcaagagacaggaattgcaggaacggtaaactgttgcagatacaaaatcaaagtctgaactaacagttaataattgtagagaatggttaccaggagactgcaaatttgaggaatttgttcatttattcattcattcattgaccaagttttttgagcctctattttatctgatagttttaatttatattaaggatgagttttcatctagttaagatacttggacatccaaagaatcagctgaaattcatataaataaaaacaaagttaatgtagctttccctgcattgattatcaaacatttattaattgcctcccacgcagcagttcatgctaggggttatgggaaataaaaactcgacttgatcctctttcttagaagactttgcacattaatggaggcaacctcaaataatttctcagttaaaataaactaagtaaatatttaatatttaacaaaatattaaaagaatgacacatgcttcatctgtctgagatttggtggaatgggaagaggtatgctcccatttaaaaatataatgtttgccaaagttaatatatgaattagccctcaaatataaccctttgattctagaaatattgttaaattttgctataaagtatttttgcctatgtcacaaaagtgcatggaattttttttctgttcttgataatttcttactttgcgcagggccccaagcatgagtaaagtttattgtgcttctgaagaaacacacccatcttttgtctttatgtagcttattcatgttcacagccatatagcagaggtaatatcgtctcttgagccaggataaaatgcagcccactagtgccatatcttccctcttatcattcttagtgttctgattccctatagtttagaagttttttaaaacttgtgttcttctttttatgtgagctttaaattaaagcttattcatttttgaagacatttatgactgcttctaaatttttattttaagacaaatagctaccacttttgctcgcctgtgccaacaagttgatattactcaaaaacagctggaagaagaaattgctagattacccaaagaaatagatcagttggagaaaatacaaaacaattcaaagctcttaaggtatttaaacctttcttctcaataatttgaacatttactggtctcattacaaaatatgtaaaattattaatgaatttgtattcattcctaatagctttttgtgttggtttaaatgaaaatcttccatatttaattccatgtggtttgcagtttcaccgaaggtttaaatgaaaatcttccatatttaattccatgtggtttgcagtttcactgaaggctaattgcaacaagaaaacaaatctgaattgaaagggactttatagatcgaaatttactcttcattaggctatattattcccttttcagaacagaagttgtataattaaaagtgaatttttagttgtgtatgtccaagacccataacttctgttttcatgggggactattgattatgtatacttaaatcataaaagtaagatgtcctgataaaatgtggatttctggtttgatatgattcattatatattatttagggtctaataaaatttgcttttggggacaagactgaaagtgtcaccattcggtctgtagttggaaattcttactcagtgcttaagaacttaactttcagctttcttacttttgcttacccattagctggcttgtcagaatgtcttggaagaaccattaaacctcatttagtccctgctgttacttctaggacacatgctacacaaaattgcctgtgtaagaacagcttagtagtcaatgtttacaaattggagggactgtctttgtgacctggattttggggcatgtacttaaaacatccatagtagtgattatccatccatagtgtcttcatctgaccaacaacacgtgttcattgtaccttagtttcaaaatctctggaaaagatgactgcctatcacttagatatttccaacctcacccacccatgtgaattgtatgtattagattgctcctattttaagtcagctcatcccatatatacctttcaaatgtggtgaaactgtgcagtagaaattggttttttgtcttaacctaggtaagtttttatggttttttggttttgatttattcagcttttgaaagaggaatactaggtaagtttttaaatagtatttcattttgttataataaatgataaaatagattattggcattagtcatgtagctttctgatttgggcaagactggcttgaataagtatgaatatttttggtctgctaatcatttttctaatagaaaaaagttaaaaaaaacaaataccataatatttggaatttccattttttactagattaggctcagccatttggatagaatttaatgtgctaacgctgcaggagagctacctcaagaaatatatacagtagagttcagagctgatgtatacttgtatgacctgaagcatatgcacacaggaataaagtaaaacaagaccctccccgtccataatggagagagagagcccactcaatgaatatgtgccctggcatagtgtgagagtgggaaacaaatctgtttttctgtcagttttagttccagttttcctctcttgtgggcatttggctgcatcaaggatgaatctagtgtttaaaggaaatatttttggtatgccattgccgctgtaacatctgctactttccttgtatgtccataagaaacactgtgtactttgtgcattatttaaagggaatttgcaagcataatcatgactctaggtaacttaggatatcccgtgtaaggtatgattccactgtctgttatgctcttcattgtttattattaaagtttttgtcttttaataatggatggaatgcatttttctccttgacctttatagtaattagattggtgttttatttttttaattagaaataaagctgttcaacttgaaaatgagctggagaattttactaagcagtttctaccttcaagcaatgaagaatcctaacaatagagattgctttggtgaccatgataggaggaaacgaaacttgtaagattggaacagttgttatttttatgaaattactttaaatatgaattgtactaactgtacctaaatagcaaagccctgtgtagattctggtaatgatctgtctcagggtatgtgtatttttgaagagtgttatgtccttagttttaattttgagtaaagaaaaggctaaaatcatgaattagttacaagcaacagtaccaacttatgtgacccctgaggggtggggctgtgagctcttaatttgtttttgattctgaaaaactctgcttcctggcatccaggagttagagattgagcctttcatcttctttctcaaaactagtttttgatgctttctttcatgggaatagtcacttttttatttagtaaatcgcattgctggaaccaccaaggagtgtggaatgtccttgagtgtattatttatgcaagtcacagtcacgttgccatcatggcagctatgtgaaacactaataaatgtgtttttactttttattcccgttaaaactgatgtaaaacaggataaaggcttgttatagtcacttataagtatctgggtctaagtaatttccttagatgtttctaaagaaacattttcagctttgctcccattatgattccaataaggaacgctttcctagtgcaattttaggagtaaagtttgaagagataaaaatagccaaagataggagacgtctgaattttgaatgataaacagtgatgttttaaaaaagctgttgttcttcaggaggcatttgcctaggatattgctggattataccccattggaggcttttaattttatttgtatgaattttccaggatttcattaaaaattattattgtattttttaccttaatgaaagattttgggttcaaatatctttctatattaaaagctgattgagtctgtacatatgtaaattatgcctagtggaggttctgttgactttcttccccactgtggaagaggccagttttgcctccatttgcacattcatttcagttatttctgatccataaatataacatttacaaaattcttccttgagctggtggaaatgcctcaccagtttcctctttaatgaatcaaataaaatctttaactgatgttaaaaaaaattgattgaaactcagatggaatggaaatgtacaaaaatgacaccattctaggaatttgctagacaaaatgtaggactaccagatcagtatctcctagacacttgttagaaatgcacaatcccggggaacgcagtacatttggccacatgtagtttatgtttccttttcatgggagggataaaatttaaagctttttttttctttgaatacagtccttccttttctatgccttttaaggcttctagatgctattcagcctttttacagcaggtgcaactctatttttcaaggtatcttagaagataacactaggccattgaagcctttcaaaaatatatttttatgcaaattgacacgagtgcagtatactaatgcaaattaattttggtgtttagcttttattgctcatttataacccaagaaatggtacagaccacagtaagtgggattaggtaacaactacaacatggaaaaacagtgtctaagatcacgtactgctaatttaggttacaaaactcaaggctgtaacctttatatgaaagtacttaagcttgaaagttcataatagtttggtatcacctcattagtatagtacagtggttctcaaagtttggtcctgggtcatcgacattacttctttttctttctgagacagggtctcagtctgtcacccaggatggagtgcagtggcgtgatcatggctcactgcagcctcaacctctcgggttcaggtgatcctcccacatcagcctcctgggtggctgggactacaggcacacgccaccatgcctggctagtttttgtaaagacgaggtttccccatgttgtgcaggctggtcttgaactcacagactcaagtgatccttttacctcagcctcccaaactgttgggataacaggtgtaagccaccacacacagctataatcaaccttcaaacttataaaaagtgtggatccttgggtctgaacccagacctatggagtcagacagtaggtttgaggcccagcaatctatggtttaacaagccatccaggtgtttctgatgcacagtgaaattggggtaccactggtattaggtttggtatggcaactttttcatcacttgttttatgtagttgtctgatcaattgtgaaaacataatgaatgttggaaatggaacagtaaaataacgaaagccaactttttttttttttttttttttttttgagacggagtctcgctctgtcgcccaggctggagtgcagtggcgcgatctcggctcactgcaagctccgcctcccgggttcacgccattctcctgcctcagcctcccgagtagctgggactacaggcgcccgccaccacgcccggctaattttttgtatttttagtagagacggggtttcaccgtgttagccaggatggtctcgatctcctgacctcgtgatccacccgcctcggcctcccaaagtgctgggattacaggcgtgagccaccgcgcccggccgaaagccaactcttatgcctagaaatatgtgcacctatgaccaagcccatgaattatacaggaattatgtaattatgagtgatgtacttcaaagttattgcacatacacttgtttactttgtatgtttgcaggattaaactttgtataatctttttacaaaaattttttttcagtatgcaagcttgcaagatgaaaataaaacctgtttgcctgatagttga

SEQ ID NO: 38 - DNA, 33065 bp, synthetic construct
  source 1..33065: mol_type = other DNA
gtagtgagtgtgatggccgccgcgaggccgggaaggtgaaggtgagagggcgagcaagccggggtggcggggactggcccggcccggcccggcgagtcctgagcagctcggcgtgggccgacgggattctggggccacgggggtctgggatgcagtcaagcggggtccccactctccggcctcgccgccgggccctccccggccctgagaggagggggcgggccacgggacctgggactggtcggtggggtcccctgtagcttctcatcgcccccgcctttccacccttcacggccatgttctacccctgccccttctctatttttcatcctgtcttcattttgccagcatttactcagcacctgataggtgtccacgttcaccgcgggagcgccctgccatccccactttgggcagttactgccttctcgttcagccctgtttacttatatgacttctcaccggactgtaaggccctggagggcaggactgtttcttatccatttctaacgtggcgcctgacacacacagagaaggcacacagaaaatgttgaataaatagctgttaagacgcacgaaggcagaactgcccgttaccccctctcgtaatccttcattgccctctttaaattctcaatcatctctctctcttctacccagaaaagggctctggttatctcttttctacccagaaaagggctctggttatccgcctctggtgtcccaaggtttggggcttgggggaggaaggcagctcaatgtagttaaaaaaggaaggaggccggtcgcagtggatcacacctgtaatcccagcactttgggaggctgaggcgggcggatcacctgaggtcaggagttggagaccagcctggccaacatggtgaaaccccgtctgtgctaaaaccaaaaactagccgggcttgctggcacacgcctgtaatcccatctactcaggaggctgaggcaggagaatcgcttgaacccgggaggcggaggttgagccgagatcgcgctgctgcactccaggagctttggagtcaaagggagctaatatttcagatcccagcttagacaaatcttcaagtattccagccctctgtcccacagaatagagaattaagtgagatactttacagtagctgaacacattggctttcagtcagttcttctgttcctcaatagtcagctgttccacagtcctcaagcccagttttgttcctagttttgctctgtcctcttctcccctctctggatgtacctttcccagggctcctgcagggacctccgtggtgcctcaaacccgcacatggcggaatacgtgtgcacagtcaggattggtcccacacctctgcgtttttttccccagggcacttcctcacatgccagcgcaactccccaatacctcaatgagtaagcttccctcagggatgagtttgtttggcttgaaacctgattagacatgttttgtacaccagtgttttttttttttggacaccggatccatctcccttttcttttctaataagtcaggactggtggagtcaacacagtcaatcaatagccaacctcaacctgagacaggacagaagagaactcagaatctttttgtcttttggacttcagccatgtccatgatgcctaccctgtgaagatctctcaccatccaaaaaagtaagtagtagctgtgacttctggcaccctggatttgagctgagtggacaggggtgtgctctcctggacctctggtggcaagtctcttgaatggcatcctctttgtatagagccacagctttctaacttgtgttgaaaaactaccgtatcttttacttccgtgaaggatttcgctggttgcttagagagcctgtttaaaagttgacagttcagaagtggctgggatctcttgggctccctgaagagttagtctctgtctccctcatttggtctctgctgtgctggctcttccccatctcggcccagcacaggttggctccttgtcactgctcttttaagactctgctctgtcccctttaccctgtatactctttttgtttcgatttctcagcttctcctcttttccagttgtgccagcagacgatccgtggatccattttattttccctgctaggagttgctgtacataacactgggtaaggaggtggtgtggattcagggactgtgcttgggatccaaacacaccttgcagtgaattttgctactgctgtctctacacccaagatacctaatactcctcaacgaatagcctaggttgaggcaaagctgttgaccaccttggagggctaatagcagtttccatttagaactgggttcatttctggtcttaggttaatatttattaatactgtgccctggcactttttaggggtaggggcaggagagtaccagaaagagtgggcttttccctaaagtgtgatcctcgggattttaaaagctattacacagaagggttttttcattgattatatttgtgaaatgctgaattcaacacagttaaactagtgtctttacaacaaggcttccttcccaaactcttttgctgtgctcacgtgctccactgaggaaaatggtagcatatggtgttttttgtttgtttgtttgttttttgttttttttgagacagagtcttgctctgtcacccaggctggagtgcagtggcgcgatcttgcagtggcgtgatcttggctcactgcaagctctgcctcccaggttcacactatcctcctgcctcagcctcccgagtagctgtactacaggtgcatgctgccatgcctggctaattttttgtagttttagtagagatggggtttcaccgtgttagccaggatggtctcgaactcctgaccttgtgatctacccacctcggcctcccagagtgctgggattacaggcgtgagccaccgcgcctggcctagcatatggtgttttacaaactgattctactattgaaccttctttacatgggatattgggtgcaagtcgagttctgtggaccacgctttgggaagtgctgccagaaactatccaaaacagtaatctccagagcacttatgaggcagtcacagcttgaagtgtgacgcttagtgtgtcactgatgttggagctgggctctcaggctatgcttgcaggatggtccccacgtgcctgtggcaaggtctgtggtgaagcagagattatcaaggctttccagaggcagaggaggaacccagctgccctgcatcaccctggaggagtagggagtcagcagtcaaagccttgagataattggggaacacaggatgtgataaaaaccagaagtctgtgatgttgtttgttctctatgaggcatcagaggaggcttcatggagcgggtgacacttgagttgggtctagaaggacagtaggagtatgccaaatgggtggaaaaggaaggaggattccaggcagaaagcagctcatgcaacacagatgtggaatctcagcttgcaagttagcagagccagataaatcaggcagagtttggaggggttgacagtaggttttacgccaggggtttggatgcagctgcaggctgggtattagtgagagcagggaggctcctggaccggctgaactcccagcagaccttgtaacctggagctcccaagcttctactggtgtacacgctgtcgagtcttgcagttagtgagcactaatgcttttggttttatatctcctgggcttgcaaacattgaccagaacttaaaagcacctgcttctgatggcagggaacttgcttcctgcagcaagtcacttctggagtggggtatcgctgatccttccccagctgacctgtttatttgatctccgtgatagcgggtaagggagtggtgtgtgtggtgtgagttggcggagttgcctctgccctccctgaaggctgggtgttcatggagagagtcttgtgatcttgctggtagagtttgttgttattgttttataacatgtaaagctgcctttagctcttactgtagtgaagcatgttgcttgcgtcatcaactttagtcttctcacagtttagatggtattgtggtattaggatattggttttcatccacggatccaggctcataactcctatccacagcccttgttatggttttttgatataatgttagatgtgttaggcctcaggggcaggcctctgaccttctgctctccttccaccctaatctttccccacctgattgtgggccttaaaaccctcccctgagaggggtggaccctgtatcctgggggaaggaatgctgatgtcatgaagcttccataaaaatccaagaggacagagttcagggagcttgtggatagctgaacacacggaggttcctagagagaggcctgctcagggagggcacagaaactacacgcctcttcccccatacctcgccctaagcgtctccttatctgtatcctttgcgatatccctcataataacctggtaaacgtaagtaagtgtttccctgggctaggtaggctgctccatcaaattaattgaactcaaagagggggtcatgggaaccccagcctgaagccagtcggtgagaaattctggaggcccagacttgcaactggtatgtttgaggggtggtggtggagaggcggggcagtcctggggactgagccctcaacctgtgggatctgacactctctccaggtagacagcatgggaactgaatgagaggatacccagctgctgtccgctggttggtgtgtggggaagaaaccccctcacatttggtcacagaagtctcttgtgttgatgattatggtgtgagagtagagaaaaaagataatttgagacagtttctctctccagtaggtgtcttgtttgttgtacacatgaagaaaccaaggttctgtgatgaaataacttgcttaagtttaagcagcccagaaataatgtagtcacaatttgaacccagctctgcctgattacaaaacctgtcataggtagtgctatatcatgccccatccttgatccctttttttttttttttttttttttttttaaagagagagacttcgctctgtcacccaggctggagtacagtggcgagatcttggctcactgcaaattctacctcccaggttcaagtgattctcctgccttggcctctggagtagctgggactacaggcatgcgccaccacacccagctaattttttgtatttttcatagagacggggtttcaccatgttggctagactggtcttgaactcctgacctcaggtgagctgcctgcctcggcctcccaaagtgctgggattacaggcatgagccaccgtgcctgacccctgatcccttttctattccttttggatggctttcctcttgtgcctgccacatcccctctttctcgaacagtctgatctgccaggccatggcaagcctcatttcagcgcactctcctttgctgctttggaagagtgagagtagcattttctttgcagtttcctttctcagagctgtactgtctttaagccctggacatatggcttccatgctgagaaaacatctctcatagctgtggcgtcatgctgaggaggaatgtagaaacggaagtggggtcacttccttcccttgtctccagaggaatcattaacattgcacaagaacttgttggtttgggcacacatgtgggtccctatcccgctttgggtcggtctgtcttctgcccactctttgggatggttagttactaaaagtccgttttggcatttggtcttcatgtacctcttccgggtgttctttctgcttttcaggaccttgtgcaacatactttggccccatttggaagtttttcacgtgtgcttgctggggagcaacacctcatttccaatctagagagagtgagcttactgctgggtggagaactgagcagtaagattagggtggctggggaggcagtgacagacccaggcacagtcagctgtgcacacaccccctcatccaggagggcctttgccctttgacttcctgggattggtgggctctgctcaagaagtagctttcgccgtggtgggaactctgagggacctggcaggggtccacttttggggtcggaattcccagtcttaccctgggcactccttctggtgtgtacgcctctttttgatctttttttttttttttttgagatggagtcttgctctattgctcaggctggagtgcaatggcgcgatcttagctcactgcaacttccagctcccaggttcaagcaattctcgtgcctcagcctcccgagtagctgggattacaggtgcctgccaccatgcctggctaatttttgtatttttagcagagaaggggtttcaccatgttggccaggctggtctcaagtgatccacccgcctgggcctcccaaagtgcagggattataggtgtgagccaccatgcccagcctcttttgacctttgaccaaagacctctaggactttggagtcaagtctcatgacctctaaaatgttgttatatgaaaagataagctacaaagatatgtaggattgagtgagagcaagagagacagtcacacaaaaatagactgtgataatatggctgggtacggtggctcacgcctgtattcccagcacttcgggaggccgaagcagatggatcacttgaggtcaggagtttgagaccagcctggccaacatggtgaagccctgtctacgaaaaataaaaaaattagctgggtgtggtggtacatgcccgtactccaagctactcaggaggctgagtgaggcaggaggatcgcttgaacctgggaggtggaggttgtagtgagctgagattgcaccactgcacccagcctgggtgacaaaagtgagactctgtctcaaaaaaaaaaaaaaaattataataaacaaaatgttgggccgggcgtggtggctcatgcctgtaatcccagcactttcggaggacaaggtgggtggatcatttgaggtcaggagttcaagacctacctggccaacatggtgaaaccccacctctactgaaaatacaaaaattagccgggcatggtggcgagtgcctgtagtcccagttgcttgggaggctgaggcaggagaatagcttgaactcgggaggtggtggttgcagtgagccgagatcatgccacagcactccagcctgagcgatagagcaagactctgtctcagaaaaaaaaaaaaaaaatgttggctgggcatggtggctcacgcctttaatcccagcactttaatcccaacactttgggaatccaaagtgagaggatcattggagcccaagagtttgggagcagcctgggcaacataagaagaccctgtctctacaaaaaattttaaaaaaattagtggggcgtggtggtgcatgcctgtggtctcatgtactcaggaggctgaggtgggaggattgcttggacccaagaggttgaggctgcagtgagctgtgattgcgccactgcactccagcccaggtaacagcgagatcttgtctcaaaataaaaaataaataagtaaataaaatgttaacattgcttatcacaaaatgatggggttatgggtttttttccccttcagtttccaaattttctgtagcacacctgtgctatactaaaatagaccaatagtttttgtgtgtgtgtgtgtgtgtgtgtgtttttctttgttgagacttggtctggctctgtcacccaggctggagtacagtggtgcgatctcggctcactgcaacctccgcctcccaggttcaagcaattctctgcctcagcctcccaagtagctgggattataggcggccaccaccacacccggctatatttttttgtatttttagtagagacggggtttcatcatgttggccaggctggtcttgaactcctgaccttgtgatccacttgcctcagcctcccagagtgctgggattacaggcataacccaccatgcctggctgtttttttttttttttttaaatagagacggggtcctacattgcctaggcttgtctcgaactccaaagttcaagtgatctgcctgccttggcctctcaaagtgctgggattataggtatgagccactgaacctggcccctaaccaatagtgtttttatgtggtcttgctctgtctcccaggctagagtgcagtggactgatcataggtcactgcagccgaaactcctgggctcaagtgaccctcccacctcagactcccaagtagctaggactgcagatgcatgccactgtgtcatgctaattttgttttattttttgagacaaaatctcgccctgtcacccaggctggagtacaatggcatgatcttggttcattgcagcctccatctcccaggttcaagtgattctcctgtctcagcctcccaagtagctgggattacaggtgtgtgccattgggtctggctaattactgtatttttagtagagacgggggtttcaccatgttggccaggctggtcttgaactcctgacctcaggtgatccacctgcctcaacctcccaaagttctgagattacaggggtgagccaccgcgcccagcctgagacactgttcttatctcaccgtcctttgttctagtcctggaggttgcagtgacctgagatccccatattcttgattctccccaaagcattccgccatctccctagcaggatgtcccgaggtaggtgttgctgggttcgctcacgttagcttctcttgcagcgcaatgtccctgctcttctctcgatgcaactctatcgtcacagtcaagaaaaataagagacacatggctgaggtgaatgcatccccacttaagcactttgtcactgccaagaagaagatcaatggcatttttgagcagctgggggcctacatccaggagagcgccaccttccttgaaggtaagggggcaccggctcagccaggcccgctcttacctgtttagatatttagctagtgggatttgcgggtggggaggtatatctctgctcccagggaagtcataaccagatagccttagaaatgctctgctcttgaaatcatgtggaattggagtctggggagatgaggccaggaagacaagggaactgccatttagtaattactttaagaagtccacatgttttgtttcatttaatcatgaaagataggtgaatcttatccccatctacaaggcaagcaaattgaggtttgagagttgtccgataccttgtaagtaatagatcagggttttacccaggtgtctccaactccggagcccacgtgttttcctttgcctagttctggctgccattaataccaggcactgtttgggtgtcagtgatccctgaccagggcgccctttctttgatatttttagattggtgacagaactataggaaactcacgtcacctatgccttttctactagttactaatttgagcccaacctctagttccttgtctatcagcagagaaggactggttcccagggccccgctcgtctgagtgtcaactccagcactggcttcctcaggctccctctttagaaggacactttggcgccaggtcctgagattgtctgtggagacccagtaactgagtcttatctgcccttggtttcctcacttgtgaaagtggggctcaggtgtgaacagtggtttcagattctagtctgcagaaccctagaagttcagtggtggtgcttcgggggttggcccctggctcaggggggccaccttctttccattctgctttcaaatagagcagcttggcttctcgttgttttacatgccaggctgctacacgaggctccctttgaagaaagagactgtccaacttcatgccctcatctgtgccctgccctttgcgtggcgcttgatgccacagaaggtgtttcctaaatacttgttgaactaaaacaaatctgaattttaaagtagtatgattggtagttgaaataatcccaactcattgcctgtttatcagtggctatggtgtgccagccgtgtgccaggtgctgggcatgcagagatggggtagatcaggccgctcccctctgggagcccagactaaccctcttggaagctctgagtcacctactcagatgatgtggtggacaaacacatgcgtaatgcaggtgtttatgtgatgcatgctttgatttctctgtgtgtgaaaatatgaggcctcccctgttgtttaaatggaagggaaagagctggagtgatcctgagctgtgctgggtcagggaaagaatggttcctgcctgggcactgtttctaacgggcaggtaacaagagcttgttggcctgctggctctcgcttttaagtgtagtcacatgcttgagagccagcttcctccgagggacattccaaaggccatgcccaggtgcccatataagggaggaatattgatgcatctggggcagaggtgaccggtggacatagcgggaggggagatgggggtgttgttgacttggtcatttcctttcatggcgctggctgtgggggaaattcactgggcaggcccttgtcatgcttcagatgctttcggagtgttctcagggctggggcctgtcagcctcatagttcccaggagtgtgcagaggggctaaacacccgtctgtgttccagccagctgaagcacctgtctggtgcgagttctagacaggacagtggtgggatctcactcagttgctcctgtatggagtaatttgttggccatctgcctgttaagggcactgggaaaaagcagtgcagtgatccaaaggtctgctcacgtagcaaacatttgtgcacctgctgggtgctggggtcagatagtgtggccctcatgaggcagatgacacagacaggtgagctgtacagttaccttatggtgaggtgagagctgagatgggagaagtgcagggtgctggggcacacagagaaggggtccggggtcctgactcaggttagaggggtggtcagagaaggcttcctgggggcagtgctgtctaagctagaccggaggccaagtgagaatgagccacgctgccccaaggcagtgtagtgtgtcagttcttcagagagtggggagggggtttgggcagcagggaatggagccagagggccgaggaagctggtgagtttggggatatggtgagggagaccgtgaggcagcgggtggcaagaggccaacagggccagggcagggagggcctcaagaagtgacatagaggccgggcgcggtggctcacgcctgtgatcccagcactttgggaggccgaggcgggcggatcacgaggtcaggagatcgagaccatcccggctaaaacggtgaaaccctgtctctactaaaaatacaaaaaattagccgggcgtagtggcgggcgcctgtagtcccagctacttgggaggctgaggcaggagaatggcgtgaacccgggaggcggagcttgcagtgagcccagatcccgccactgcactccagcctgggcgacagagcgagactccgtctcaaaaaaaaaaaaaaaaaaaaaaaaaaaaagaagtgacatagagtggttaagagcctggactccagagccaggctgcctaattcaaatcatagctctgccttttactaactccggagccatgttaataaagaggaccaaaggagagaatgaatttgaaaagtgaaaggaacagtgcctggcatgtggtaagaacttcgtaaatatttgttaagaaaaaataaacaaggaaggcagttaacatttaagtattcatcttctaccagccgccattcacagcatttgtgtttcaattcgtttgatcctcacgatgttctcatgaagtagataatgtagttatctccgttttgtgcttaaggaaactaagacccagaaaggttcttttgcttgaggccacagagctagaaagtggtaagaaccagcttcagaaccaggcagtgttgctcctgagccatcttcttaaccaccacaccgtggggccaccatagaggatctggagctcagcctgtcggctgcagggtgccagaggtggactcgtttagggtaagcagggccggcgctctggcccttccagacttgggactgtggaactcctctgaccacgtggtgacccattttcaatccccacctccagacacgtacaggaatgcagaactggaccccgttaccacagaagaacaggttctggacgtcaaaggttacctatccaaagtgagaggcatcagtgaggtgctggctcggaggcacatgaaagtggctttttttggccggtaagtccttgaggcacccaccctttctttcttcctggctaggagggagggaggcactttgtgcaaggtcacagaacgttccaggcagggacatgcttcagaattcattgctttcctcttaatttatattttatttatttatttgatttttgagacagggttctctgtcacccaggctggaagctcattacagcctcgacctccctgggctcaggtgatcctcccacctgagcctcctgagcagctgggactgcaggtgcatgccatcaagcctgacttttttttttttattttctaattaaggttaaaggcatataatataaaatttaccaccttaaccattttaagcatacaattcactagtaggtatatttgcaaccagtctcaagagctttttcatcttgcagaactgaagcttgtattatagccattaaacaataactccctgtcccacatgtcccttgccctggccaccaccattctactttctgtccctatgaatttgactattctagatgtctcacgtaagtggaatcatacagtatttgtttttttttctccattcataaaacttttattccacttacatgaatttaatacacgtgttcttaacaattgtgcttgtattgttcatgaaaatttcgtaagacattaaacaaagctagccatcatctcaagttatttccctgttaactatttttacagtgcatgcatgttaggcaagcatcaaaaaaaaatcacaaaagcaaagaatctaaaaatatgccgggcatggtggctcacacctgtaatcccagcactttgggaggccgaggcaggtggatcacgaggtcaggagatcgagaccatcctgtctaacacagtgaaaccccatctctactaaaaatacaaaaaattagccgggtgaggtggcgggcgcctgtagtcccagctacttgggaggctagggcaggagaatggtgtgaaccccagggggcggagcctgcagtgagccgagatcgggccactgcactccagcctgggcgacagtgagactccatctcaaaaaaaaaaaaaaaaatctaaaaataagttaaatacgtgttttttttgttttgttttactgctagcttgatatacatgaagtattcatttttcctgcatctttacttttacatttgttcttaggttgcctgaaacattttaaatacaaataaaatgagtgtagcaaaaataatgaaagctaacagcagataactttacaaataatggagtgtgaaccatttctgcccttatccagattgaaatgggtcacaactttgtttaaaggaacacttccacagctgtagtcaaaggtgtgcacattgagattgagtattccacagacacacatggtttaacatgtgataaccatggggtatctgtttctaccacagccttgtaagtgctccaaaccttaaagtacccacatttactatacctgtgactggaaccaatgatcctttttattccccaccaggacaaaccaatatgtaggcagttttctttgctttgacatggaagcagttttaacactggcccttgtgaagccacaatgtacctaaagtactaggccaaacatttataacttgtataatgaccaggcacggtggctcacgcctgtaatcccagcactttgggaggccaaggcaggcagatcacaaggtcaggagattgagaccatcctggctaacacggtgaaaccccatctctactaaaaatacaaaaaaaattagctgggtgtggtggcgggcgcctgtagtcccagctacttgggaggctgaggcaggagaatggcatgaacccaggaggtggaggttgcagtgagtcaagatcgcgccactgcactccagcctaggtgacggagtgagactccgtctcaaaaaaaaaaaatctaatacaagaaaaaaggcatctagacagattgtatgctaggcacacagtggtagcctggggaataggcactgtgcctagagtcttgaccctgatgaactgtaacctcaggtgtggtcctctactcctctgaactatcatttcttcatcctcacctgggaggtatgaccccctacttaggtgagctagtgggcttcctgtctcactgggtgcaggtaaggtcattgtagttctgctctagtgatatggctgagaaacttcaactcagaatgagaaacactgtgtttagcacaggttgaaagctctgagactcagagcagatgagtctgctgagcagagctattctcaagaagcagaaatggtggggtgcagtggttcacacctgtaatctcagcactgggaggctgaggcaggagaattgcttgagcccaggagtttgagaccagcctgagcaacatggcaagaccccatctctaccaaaaatttaaaaattagctgggcgtggtcgcagctatagtctatatataggtggtacctatagtctaagctacttgggaggctgaggtgggaggatcattgagccctgatggtcgaggctgcagtgagctatattcatgccacacgctactgcactccagcttgggcgagaaagcaaaatcccatatcaaaaaaaacaaacaacaacaacaacaacaaaaaaccccaccagaatacatgaaaggggtgtgataggtaagaatgagaaagtaggctgggcatggtggctcatgcctgtaatcccagcactttgggaggttgaagcaggcaaatcacctgaggtcaggagttcgcgaccagtctggccaacatggtgaaaccctgtctctactcaaaatacaaaaattagccgggcatggtggcacatgcctgtagtcccagctacttgggaggctgaggcaggagaattgcttgaactcaggaggcagaggttgcgatgagctgagatcgtgccactgcactccagcctgggcgacagagtgagactctgtctcaaataacaataaaaaaaaaaagaatgagaaagtaaccttccctttagcctggcagttgtcagctgggactcacaaggtggagcttcatgtgtaaggaggagcgtgatgggagaaaagcagcgaaacatgccctgtgtaggaaacactggggtcatttagactgaggaagacactctgggggttagtcggtgtttcaggtaggcctgaattaaactttggagacagacagacagtctctataagtgttgctgagggtggctgtgtgattcaaggggcagacagcacgcagtgagcctcttgtagattgatctgaaatgatgaaccaggggcatgtcagaggtttgggcctgggggtgtttattcattttaataaacagtgcctactctttgtctctcagcactgtctgggcactggcaacattgcactgaatagggctttggccttccaggctggtatctgcgttgtgaaagtaattcaggtcagatactggtggctttgctgacagctgttacttccttctaggacgagcaatgggaagagcaccgtgatcaatgccatgctctgggacaaagttctgccctctgggattggccacaccaccaattgcttcctgcgggtagagggcacagatggccatgaggcctttctccttaccgagggctcagaggaaaagaggagtgccaaggtgagggtgccaggctggctgtcagccctgtgcctgctgggggagcaagtcctccgttgtgacacggctgacctcacctctagggagggggcagcaccaccctgtggaggtgaatgggagaccctattttagatgaactttttgaaggatgtaagagcttttgggggctggcggaggtggttttcagaaacgtggatcaccaagaatgaggaccctgctgttcctcatacagctctgagtggccactgacctctcttcactaattaaggaagacagtatgtgctgtgttcttccttgggatattgccagagaggaattcctgcatttgctgtgtgtctctgacctatcagtcagggaccgacactctgagttttctgagaggcagctgcattcttgtttggggccagatgctcaatttgcttcataaagaatcaattggtcgggcacggtggctcacgcctgtaatcccagcactttgggaggccgaggtggatggatcatttgaggtcaggagttcaagaccagcctggccaacatggtgaaaccccatctctactaaaaatacaaaaattagctgggcgtggtggtaggcacctgtaatcccagctagtcgcgaggctgaggcaggaggactgcttgaacccaggaggtggaggttgtggtgagctgagatcacgccactgtactccaaacctgggtgacagagcgagactccgtctcaaaaaaaaaaaaaaaaaaagaatcaatcagtgcagaacagatgactttagggtgatatccgggaaagaagctcaaaagagcagtgaagaaagtgggttcttattgacaactcccagctgttaactttttatatgtggaagaagaaagggtagcagatgggcagcattcccagccactgtgctgtgatgcagcggcacaggaaatctcctggcctggtggttcctcctcagcctctttctttccttcctctgccatcagactgtgaaccagctggcccatgccctccaccaggacaagcagctccatgccggcagcctagtgagtgtgatgtggcccaactctaagtgcccacttctgaaggatgacctcgttttgatggacaggtaagagggaggtgccctcctaggaggtccaaactggaaggcaccaggtttccatttctggataatctaggccagggtccctgggccccatccttgctctgcttaagtattactacctttcagatgggctcaaccaaatcctctggcctcttggctttcctctggagtctggttactatacctatttatcagtaccctgcagatgtcccagggatggtctgtaaaagataggagggatgctcaaaagttggtgggggaggttctcaatctcagcccagtgccagcatgtgtactgggggtggggagttgtggcggagtcagaggtgtattttatttcccttgaagaaacactttgccttggcttggtggactggttataactataccaacatgtacagtattgtagtgtttatctggactcacatcaagtcacaacttcaccttaattgtatatcatcttttttttttttttttttttttgagacagagtcttgctctgtcacccaggctggagtgcagtggtgcagtctcggctcactgcaacctccgcctcccgggttcaagtgattctcctgcctcagcctctggagtagctgggattacaggtgcccgccaccatgcctggctaaattttgtatttttagtagagacggggtttcaccatgttggccaggctggtcttgaactgctgacctcatgatccgcccaccttagcctcccaaagtgctgggattacgggcatgagccactgtgccccgcctggtatatcatctttaaagtagaattacaagtaattctgtttttataaaagcaatagatatatgtgtttaaaaacactcatttctgccaggcacggtggctcatgcctgtaatcctagcactttgggaagctgaggcgggcagatcaggaggtcaagagatcgagaccagcctgaccaacatggtgaaaccctgtctctactaaaaatacaaaaaaattagctgggcatggtggtgcgtgcctgtagtgccagctacttgggaggctgaggcaggaggatcgcttgaacctgggaggcggaggttgcagtgagccgagatcgtgccattgcactccagcccgggcgacagagcaagactctatatccaaaaacaaaacaaaacaaaacaaaacactcatttccaggcaatctggaaggataggaaatgggaagtaaaatccgttaatgagggccaggcctgatttctctcccgtccctggctttctcctccatgacctgcctgcctcacaagtcccaggtctgttctcagcaggaagaatagggctcctgctctgcctgatgatttggtttacccctgtcacctttagccctggtattgatgtcaccacagagctggacagctggattgacaagttttgtctggatgctgatgtgtttgtgctggtggccaactcagagtccaccctgatgcagacggtaactcctcctctgccttctcccaagctcccagcaccccctgggcaggcagctgatggggccttggctgtcaagctcctgctccaccgaggtcttaccctttatctaggaaaagcacttcttccacaaggtgagtgagcgtctctcccggccaaacatcttcatcctgaacaaccgctgggatgcatctgcctcagagcccgagtacatggaggaggttcgtgcttctgtttggcagtttggggaatgcaaccccgagggagcactgcctgccactggggccacttcctgcacccctggatctagtgacttccctgaattaattttattgccaaagaattctccaaatactcttctgtggtatcttctggtggtctttcccctctcccatccactttgctggatgcaccccctcttcaagccactctcccctaggcctaaaaaggatccctgctgcattagtgcatcttcagtgccggtgctcagtttggtttctgaggaattaatacagaacaggctcagctctagggaggcctctgggaaagaggctggaaagaggaatggagaataactggttcttactggtgacttacaactcttagctatttacttatttatttagagactgggttatgaggctggctaatttttgtatttttggtagagacggggttttgtcatgttgcccacgctggttttgaactcctgggctcaggtgatccacctgcctcagcctcccaaagtgctgggattacaggcatgagccaccacgcctggcctcacaactctttaaatatgtgaaatgaaagacaaaagggtaacaaacggcatggtggtgcacacctataggctgagagaggatcccttgagagtaggaatttgaaaccaccttgggcgacgtagcaaaacgccatctccaaaaaaataaagggtaggccgggcgcggtggctcacgcctgtaatcccagcactttgggaggccgatgtgggcggatcacgaggtcaggagatcgagaccatcctggctaacgtggtgaaaccccgtgtctactaaaaatacaaaaaattagccgggtgtgatggtggcaggcgcctgtagtcccagctacgcgggaggctaaggcaggagaacggcgtgaacccgggaggtggagcttgcagtgagctgagattgtgccactgtactccagcctgggcaagagagtgagattccgtctcacaaaaaataattaaacaaataaagggtaataagattgataatatggcaatatgggatgataaaacatgcagttgcagtcagtaggccagagtccaaattatttatttttttcgagatggagttttgctcttgtcacccaggctggagtgcagtggcacaatctcggctcactgcaacctccacctccagggttcaagcaattctgcctcagcctcccgagtagctgggattacaggcacccgccaccacacctggctaatttttgtatttttaatagagatggggtttcaccatgttggccaggctggtcttgaactcctgaccttaagtgatccgcccgcctcggcctcccaaagtgctgggattacgggcgtgagccactgtgcccgcttgtgactgacactaggcagtgtgactttgttagcttccttgacccttctggtaatccaatttcctggccagtgtgatggtgtgataaatagacttgttgagaggatgaaatctgtcaaaaacacctgacacgtggtaggtgtctacaagaagctattgtcacattttatcggtagaaccccaggatgtcagagccaggagggatgttctagtgatgcccactccttttataaacaatgccccaggaggacacagcttgtcagagtataggtcccagatttaggtttcttgacctcagggttcctttcctgccagggcaccaaaatgaggcactatataggcttaacaagaggcagtctagggcacgtttaagcatttctgcttgtatatgcataaaatatctttggcacgctcactgccaagtaacccccacacgttggtctgggaaacttggtggtgagagagcagaatagtgggggacattacactgtgtatgtgtttgtgcctttggctgttgagccatgtgaatatattgcctattcttttttttccctcactctgtcgcccaggctggagtgcagtggtgctatcttggctcactgcaacctccgcctccaggttcaagtgattctcctgcctcagcctcctgagtagctgggattacaggcgcctgccaccatgcctggctaatttttttgtatttttagtagagacagggtttcaccatggtggccaggctggtcttgaactcccgacctcaagtgatccacctgccttggcttcccaaagtgctgggattacaggcgtcagccaccatgcccagcctcttatgacctattcttttaataaaagaggcaggtgggggctgtggggccacctacactcactctggacacatttgtttgggctccaggtgcggcggcagcacatggagcgttgtaccagcttcctggtggatgagctgggcgtggtggatcgatcccaggccggggaccgcatcttctttgtgtctgctaaggaggtgctcaacgccaggattcagaaagcccagggcatgcctgaaggaggtaatgatgagaacagatgtcctccttttctctgatgtttgagacattttgtctcgtgctgaggagtctgtcagtagaaaatccttctgagaaggggatgctgagaagagcagagaggctcttgctctttagccagtggcttggtttctggggatttcatcgttttcctctgctgccaagttgtttctggactaatgcagtacaatcctcctagggggcgctctcgcagaaggctttcaagtgaggatgtttgagtttcagaattttgagaggagatttgaggtgagtcctctgattctggtatctggcgattctgtgcctccccagctcccattggctgtgtccctggcagtgaaaaccagagtctggcccttggttgtaggcccctggtggcccccacctccctccgtgcctctgtgtgttccaggagtgcatctcccagtctgcagtgaagaccaagtttgagcagcacacggtccgggccaagcagattgcagaggcggttcgactcatcatggactccctgcacatggcggctcgggagcagcagtaagagtccaagactgcagataggtggagagagctgccgagacaagggtgctccacccctgccttgggcagttaggacacgccttgatggcagggctgagtctctgggctcccatccagagccctttccctggccaccagaccatgttagaaccacatagacagcctggtgaggagggcggctgggtgcttcatcaccccacctggtctgtgcagcacgattccctgtgttggaggtcttggcccatgccctgctgagctctgcagccattctcagagcctgaacacatttttcaaaacaacattccagccaggagcagtgactcacacctgtgatctcaacactttgggagaccaaggcaggaggactgcttgaggccaggagtccagcccagataacatagtgagatcccatctctacaagaattttaaaaatcagctgggtgtggtggcacacacctgtagttccagctacttgggaggctgaggcaggaggatcactggagcccaggagttcagggttccagtgagctgtgatcgcaccactgcactccagcctgggcaacagagtgagaccctgtcactaaagaataatatgaaaacaccttgcttctatcacacagaattgactttctcagttgtttatgttaagttaaaattttaaaaagttcagttcccttttgattcttttgcacttgtcccagtgtcactctgccctgaggcaccataatcatgaatttacattgttctatcacccaaacagtactttttacataaatgctgaggaatatgtcaggtttttacatgcttcagatgtacagatgtggcatcacactgtctgtcactgtacctggctttgctttctcaacatcgtttttccctctatccttgttagtatgtgtagtttgtttatgaatcggaactgctgtagtatattccattgtgaatatgcctcattttcctatggatggaattttagattttttttttgctattggaaaccctactgcagtggacatttgttcatgtgtccccttgtgcacctttttaagagtcttcctggggtgagttcctaggggtgtggcaattctgttttagggtacacgcgtttccagttttagtcagttttcttgatgctcttcagaacagccgtacccattcattgcatgaccagtactgtccataggccttccatttcatcagccctcaccagaacttcagacctggtcatttttgccaggccttggtagaaaatagtgcctttaaaaatttcatttacaactgggcatggtggctcacgcctgtaatcccaacactttgggaggccaaggcggatggatcacctgaggtcaggagttcaagaccagcctgaccaacacggagaaaccctgtctctgctaaaaatacaaaattagctgggtgtggtggcgcatgcctgtaatcccagctactcgggaggctgaagcaggagaatcgcttgaacccaggaagtggaggttgcagtgagtggagatcgtgccattgcactccagcctgggcaacaagagtgaaactccatctcaaaaaaaaaaaaaaaatcatttctgtgattactagtgaggttgagcttttttccctatattaattggcagaatttgtttaaacccccttaaagcgccctccctgttttgtgcccaccacctgacccacatcgaagactgaagagtgcatggttggctgcagggtcctcttcttacctgggaaggggaaggccatgcccctgggtgcgtgtgtgcagccctgccaggcaagatagcgggcagggcggcgtgggatttctggcatcccctcttgctcctctgcttagtcagacaggaacatggatttctcaccagtactctgctttcagggtttactgcgaggaaatgcgtgaagagcggcaagaccgactgaaatttattgacaaacagctggagctcttggctcaagactataagctgcgaattaagcagattacggaggaagtggagaggcaggtgagaaatgaggaggaggcattctgggaagatttggactccgagtagagtccagaagaaagcagacctcctcctcttagggacttctcagcctttcagaagaaagttgtggccctgtttcaagaatacagagctgccgtttgggttccattgtcgggttgtgtgatgctgggcatgttccctttcctctggacctccacagatcatgtgggcgtttgatcagccagtttcccagaccctctcacttcagaggctttaattccatagaggagctgaggaggctgctggtttgagaggaaggatgtgccatctgctaggatctctcctggtgctgcaggagtgaactttggtcttccttgatacttaacagtgtgcttccttttgctgtaggtgtcgactgcaatggccgaggagatcaggcgcctctctgtactggtggacgattaccagatggacttccacccttctccagtagtcctcaaggtttataagaatgtgagtcatggagcaacaggtcctcttggcaggaggcccccaaaagtgattcaacccctgttggtctgggtcagggccccccagcagtgacagtagaagccacagagacaaggcccaggcttccgtcagccttctggggtcacctggtggatgtggcctgaagggaattttgatggacatgcttctcttaacttccctcttctggtggcaggagctgcaccgccacatagaggaaggactgggtcgaaacatgtctgaccgctgctccacggccatcaccaactccctgcagaccatgcagcaggacatgataggttagtgcccatggggaactgggcagctgtggccctgggctgcccaaagatcagatgcggaggccaagctaaagaaatcaggactttccttatctgtcacttttcatgatgattcaactcgataccttcaggttctgggtacatgttctgaactcattcttgtttgctttttgagacagagtcgcactccgtaacccaggctggagtgcagtggcatgatcttggctcactgcaacctctgccaccgaggttcaagcgattcttctgctccagcgtcccgagtagctgcgactacaggcgtgaccaccacacctggctaatttttttgtatttttagtagagatggggttttgccacgttggccaggctggtctctaactcctgacctcaagtgatctatctgccttggccttccaaagtgctaggattacaggcatgagccaccggccctggccttgtgaactcattctgtacacagggttggggagcccatcttgttctactacatgggtctaccctaggctgagaattgggcctgctcctttaagtccacgtgaggcataagtgttagcagtatggcatctgagtccacacttgcctgggagagctggcctcaagtgaggcatgctcagtctcacgggccaacttgactggggtgtggttcccaggcaaagctgttcagcatccctggcagtagctggtagagccctgtctccaaggcttggtgccgctgtggtgcagggctgagctgataagcttttcctccatttctcttcctgacagatggcttgaaacccctccttcctgtgtctgtgcggagtcagatagacatgctggtcccacgccagtgcttctccctcaactatgacctaaactgtgacaagctgtgtgctgacttccaggaagacattgagttccatttctctctcggatggaccatgctggtgaataggttcctgggccccaagaacagccgtcgggccttgatgggctacaatgaccaggcaagcaaagttcctcacctcaagggcattgtggggggtcagtctgtaccctgcctccagacacgggaaccattctaaaacgggggttccctaaggtcagcagctgtggtggtgtgccccaccacacagtacaccacagacagaatttttgctactgattgacctggatttgttctaagcagtgatatttgtgaaatgacagatgctagtatttttctctaatacacattaaagtaagtatgtaactattaaaaatagacgactttaaaaataaccacctacatacgactattttaaagttcagattttaaaaacattcatctctaaaccacttgagttgtcacatgtactgccctctgtacacatcccacactcggggaagctgccaggcgggtcaggatggctcctgctcacattttgcacgtcccgtggtgctcacctgagggtctcctctgctacatctgaagctagttgtcccctttttgccttttggaaattgaagagccactctgtgtccctgttccccagactagggcaacactgagggttcacgtgaatgagagactcaatacgtccccctcacccctctcatgtttctctcctcaggtccagcgtcccatccctctgacgccagccaaccccagcatgcccccactgccacagggctcgctcacccaggaggagttcatggtttccatggttaccggcctggcctccttgacatccaggacctccatgggcattcttgttgttggaggagtggtcagtgaccagttctgctcgggaaggtgggggcggagggcaggtgggcggggcctgagggctaggttcctgctgtggcccctgcattgggccacactccacagtccactgcatactttctcctctgtgattgcatggggagcgcttactccctcaccaagtttccctcacttcctgctggacatggtcccagaccttctggcctcggtgggatcaaaggagacattgaaagaggaactcagagtagaaacatgaaggctccttggctggggcccttcagatggccctggtagtgatgggccccagaggagggtgggccacagagaggctgcactccaggctgaccatgtgctctgcaggtgtggaaggcagtgggctggcggctcattgccctctcctttgggctctatggcctcctctacgtctatgagcgtctgacctggaccaccaaggccaaggagagggccttcaagcgccagtttgtggagcatgccagcgagaagctgcagcttgtcatcagctacactggctccaactgcagccaccaagtccagcagtgagtggccctgtcggaccccagcaggggacttcctttaggcagggtcagccccatctcccttccccatctctcttcccacgtggcctggaagccactgggtcctaagcatcgtagaccctgggccttcaggtgtgcagggccagctttgaggccagtcatggggagaggggtctcccagggacactttgcgtcttgggctgggacggggtaggcctctgggccccttggtgaggaagaaatgggaaggcaagagatattcctagtaggagttttagaggttgccttgaagagcttgggctgtggatgtagttttgaagtttttgaacccagcctgatcttcgtgcacatcttaggtcaggtgggaatctattgcctaatctggggtggtggggatgaatatcctcgcttccttttttttattgtgtgtggcagaccctttgctctagacattttgcacctaattatttctctgactcttggaggtagatgttgtcttatagccatctcctttttctttctttcttttttttttaattgatcattcttgggtgttttggcagggtcataggacaatagtggagggaaggtcagcagataaacaagtgaacaaaggtctctggttttcctaggcagaggaccctggggccttccgcagtgtttgtgtccctgggtacttgagattagggagtggtgatgactcttgacaagcatgctgccttcaagcatctgtttaacaaagcacaccttgcaccgcccttaatccatttaaccctgagtggacacagcacatgtttcagagagcaccaggttgggggtaaggtcatagatcaacagcatcccaaggcagaagaatttttcttagtacagaacaaaatggagtctcctatgtctacttctttctacacagacacagcaacaatctgatttctctatcttttccccacatttcccccttttctattcgacaaaaccgccatcgtcaccatggcccgttctcaatgagctgttgggtacacctcccagacggggtggtggccgggcagaggggctcctcacttcccagaaggggtggttgggcagaggcgccccccacctcccggatggggcggcggccgggcggaggcgcccccacctccctcccggacggggtggctggccgggcgggggctgaccccccccacctccctcccggacggggcggctggccgggcggggactgaccccccacctcccggacggggcggctgctaggcggagacgcttacttcccagacgggggcggctgcctggcggaggggctcctcacttctcagacggggcggctgccgggcagagacgctcctcacctcctagacggggttgtggctgggcagaggcgctcctcacatcccagacggggtggtggggcagaggcgctccccacttcctagatgggatggcggccgggaagaggtgctcctcacttcccagagtgggcagccgggcagaggggctcctcacatcccagacgatgggcggccaggcagagacgctcctcacttctcagacggggtggcggccgggcagaggctgcaatctcggcactttgggaggccaaggcaggcggctgggaggtggaggttgtagcgagctgagatcatgccactgcctgggcaacattgagcactgagtgaacgagactccatctgcaatcccggcacctcgggaggccgaggctggcagatcactgccggttaggagctggagaccagcgcggccaacacagcgaaaccccatctccaccaaaaaaatacgaaaaccagtcaggcgtggcggcgcgcgcctgcagtcgcaggcactgggcaggttgaggcaggagaatcaggcagggaggttgcagtgagcagagatggcggcagtacagtccagcttcggctcggcatcagagggagaccgtggaaagagagggagagggagaccgtggggagagggagagggagcgggagagggagagggccatctcctttttcaaaatcaagaaactgagatttgaaaaatagtgacgtgtcctctgctactcggctgatgagcagcagagtcaggatctcttgtgcccaaaccagggtgcacagctctgtgctgttgcttctcaggccgtggtgatgctgagtgtgtttggttgttatgattattcagtctcagcagggtgtaggagattctgccaaaccaggcctggctcagggcagagctgctggcagggatatagacaggcccagctgctccctactgtgggtgggctaagccaccagtggcatcttgctccacacaccccaactgggtcccttctctctcctccccagggaactgtctgggacctttgctcatctgtgtcagcaagttgacgtcacccgggagaacctggagcaggaaattgccgccatgaacaagaaaattgaggttcttgactcacttcagagcaaagcaaagctgctcaggtgaggctggcccgtgtggccaaaggttagggctccagggtgcagcccaggcacactggggctcagctgctgggcttgcgtcttgggtgtggacacaaatttttctggtggggatttagctcattcgtgttagatgtgtaccatgggctgggcacggtggctgacgcctataatcccagcactttgggaggctgaggcaggtagatcacctgaggtcaggagtttgagactagcctgaccaacatggtgaaaccccgtctctactaaaaatacaaagattagctggtcgtggtggtgtgtgcttgtaatcccagccactcgacaggctgaggcaggagaatggcttgaacccagaaggcggaggttgcagtgagccgagattatgccattgcactccagcctgggcgacaagagcaaaactctgtctcaaaaagaaaaaaaaaatggatgtgtaccacgtacctcatggatgccagatggtgctggaggctcaacaagacacagcgtcgctgccttcaaggcacttgcagttgaaggcatgatggcatcacagtactgcgagactgcagttcacagcgccctgtgctgaaccgcagggcctacagcgcttaacatgtgctatttcactcagtcttccctatttctccattttctacatagaaatgttggggaacttgtctggcatctcaaaaaatggccaggctaggaggggagcccaggtgtacttggctccagcagcccccgcactctgattctccttacctgccactctttggacccatgaagagggcatagccccccatttacccacagagaagctggttacttggctggggactggcagagctgggattggaactcagatctccatggggtctctgtggagctttcattaataatttgctggaaagaacatcagtctgaggagtctggagtcctgggttctctccagccactcatgtttggcccaagctcttaactctcctgtgtctcattattttcatctgtaaaatgggagtaagatttcatgacacagctgcatgactgaatgtaaaagtgccctgcaaaagtcctcggcctgcccagctcatgataacatcagcacacggggaccctgcagaagtcctcggcctgcctagcccatgatagcatcagcacacggggaccctgcacttcctgccctcgcccctgacgtcagagtctgcagggtggcagagccagaggggagatggatcagagggtgtcagctccaaccctcaccggatcactgggctttccctgccctcgactgcggatgtgccccccccgcacccccacctggggacagctgcttcctagggacacactgcttgccctctggggactctcagaaagggggaatggggggaactgctgcttgtcagccacagtgacacagctgaacctggaaagggtctcctgtcagcacctcaaccccttgcttggcaagcagggaaactgagttcccgacagctcagggacttgcacatggtcctgggtgaaggaaacacagggcttgagaatcagaaaagcctaacttgtagctccctggcttattagccgtgtggccttgggaagttatttaacccctctgggcctccttttccccatctgtgagacagggataaacacgattgttggaggatgatgtaagggtgtgtgtcaagcgtccttaggatggtgcctggcgggtagtcctaatactgcctatcatcagctatcatggttacaaaagaaccatttctttgcaggaataaagccggttggttggacagtgagctcaacatgttcacacaccagtacctgcagcccagcagatagtgggcacctgaggcggagtctgcgtggagaggggcggtgctgccagccctaagtgccatgtgggctcccccaggggcacgtgtggctcctgccccctggccactgccaagagaatgaagcacccagtctcgtaccattttgagccctccagcactacttattttcccccacctttgcctgctgttgctggaagagctggctcatacccccaaaggacactttcagcgacagctatggacagcatggtaccaaggagttaagttgaggctttttccagctttctctggttcatttgattgcttgataaggcctcaggatctcagcattgcacaatgcctcatggaagcctttgagggtatcacacagacacccccaccttcctccagcctgtgcgcacctgccctccttgcagcccagcacacctgcaggtgtaagggacgattggagtttcttcccagagagtctgtcccagaaggactgtggcttgtgtgtgtccatctcgcctgttggctcagtgcttcatcccatttgcagagcctcagacacgtcttggtggtgaggctcagttacccctgggcttaggctgaggcgggccctgtgctgggggtggtagaaaggatgctgctgaggcagctggaggagtgggagtagctcagaggggagggctgttggatgtatggggagctggcagagcaggtggcagtcactgggacaaggagggacttgcctctcttctcattattgtgtcctttgctttagtgtcagtcctggacttgtgcaggcctgttttgtgtagatctgttttggaagatggcatggtctaggtggttgaaggatgtagtagaaggatggatggtggaaggtggggacgttggtggctggctgaggtgcatgggccccacacaggacagctggagaatgggccgtccacttggcctcgttctgcgaggggctcatgggtctgagagcccccacccactaggcttgattgcatccctgttgtgccctttaagagacatgtttccaccccacccccaaccttgtcccaagtgccctggactaaatttcctgtgccagtgactgcagttggccaagggacaatgtggaaaacccagtgtccatctttccaccctccctgatctccagaaccttcgactgacccccttgtctttatgctgatgttgagttttgggattgttactggttgaagtgggggcagatgcctgtcaccaaggtgttgactgtgtgagaaaagcagtttgggtgacaaatcctgtgtggcacaagttggatcgcttcctagaaataagcaacacctctcccaaaaagcagcccacaaggcaggggcccagcagcccagccatcactcatctttgaggaaatgagttggtagcctctgtgcactgtttggtggccacatcacaggtgatgtcctgttcacatacctgcttgtatttaaagccctcagtctgtcctgttgtgtggggcgaagtgatggactctgccaggtggacatgctgtgggtggatgttcccggcgtgtgccgggcctgaatggacaggggccacttcacagcatgtcagggaaaatcactgtcacacaattccaatggattttgtgctctttttgaaaaaaaaaaattctttagcgtaaacatgaattttttttcaatgtagcccctggggaatgaatgaaattttgagcttcttcaatacgtaaaattaaatttataccactgagggagagaccctttctgaaagaagtatggccaaaagcactttaatgctgctgacattgttgtttttatgttcatttgctggagcgcaagacgtgctgacacagtgagttttctctgatgtatttaaggtgatgtatttgcttgagttactcctgtatcattgctcataatattggaaactaaaataaaacctagttggaaatcc

SEQ ID NO: 39 - DNA, 83226 bp, synthetic construct
  source 1..83226: mol_type = other DNA
acagcccgctgggccggaggaggcggagctggcgctgtcccggctctcttgcggggaagcaactgagggggcggcgcggcgggccccggcggccgaagaggctggcaggtggcgccgtggggtgggtgctcctggtgagaggagtccactccgtgcgtgcgggcggaggccggcccccgagagccgccgacatgaagaaagacgtgcggatcctgctggtgggagaacgtgagtccgcaccctctggccggcccctgagtccctgccctccctgcccctgcagcccctgtcgcccctgtcgcccctgcagccccaacctttgcagccccggcccttctcgcgcctcacagctccgctcgcctttctccgcgttcctaggccttccagccccttcactcttctcttttggctggccgccggcggccctcaccctgtcacctcacctgggccctccagagatctcctttccctgttccccagccgtcctcccaagccatgtccctattagccctaaccgcccgacctcatccctccgaagcttctctcctccttttcctcttcgaaccctgtccttctgggcctcacagtttcccaggccgcctcctttcagaccttcttgtcttctggagattcccttatcactgccaggcaggtgctggaataagcagactgaccaatagggattgcgtgaaccggctcccggggaagctgggggaggggtgcagaactattcgacttgtgggcaaggtcaggtttctgcatttttttggcactcgcagtcttcactctctctatgtattgacattaagatatgagtagtggaaagggccggatcctttttagcagtacttgtactttgcattggactaactcctcgtactcgagatatttcatcaaaaatttttactcaacttcgagttatgcaagcgctcaatgaattagaattatctggggagggtccaattgttgttaccctaaagcgtaatctttgccctctttttaagcattatttattccatagttacttcgtagttaacttattaataaccacaggcacacagacatttgatatctccccccacccagaaatttcatacatttcaccttttgaaaatataataaaggagagttccctctgttcactgacatgaggacgcaacagcggggacttcttgatttcactctgcaagttatgtaactcagttgctaggactaaaataagaaagtgggccagggataactggattgtttgttttaaagagttaatacattcgttaatagtctgccattgctgtttcgaagcattctgttttaaaccattatttcattcttggtaacccctcagggtcaccgtgatggaatcccaaggaagaaagttaacacgtttttaccctcttctgtagtgttctttgagttcattgaaatttcatccacctgctgtttggagaaatcttcctttagaattagaatttaggagtaagcttagccagccatagtttactttttgatttgcagttgtaaatttttatttttatttataactatatcttaatctgtatttttcatggacttccttgacaaggttcaggaaggtgttatttaacatataattcatgcttatgcttttggagcaaggtagggaaagtgagtagacgacttgcttaaaaaactgatccttaaatatatgatgaaatagtttgttgttgttgttgttttgagacagagtctcgctctgtcaccgaggctggagtgcagtgcctgggattacaggcactgtggctcatgcctgtaatcccagcactttgggaggccaaggcaggcagatcacttgaggtcaggagttcgagacgagcctggccaacatggtgaaaccccgtctctactaaaaatacgaaaattagccgggtgtggtggcacacacctgtagtcccagctactctggaggctgaagcaggagaatcacttgaaccctggaggaggaggttgcagtgagctgagacatgccagcctgggcagcagagcaagactctgtctgaaaaaaaacctttaataatgctcccacacagctgggtgaggtggcttatacctgtattccaagcactctgggaggctgaggcaggaggatcacttgaggccaaggagtttgagaccaacctgggcaatgtagtgagatcctgtctctacaaaaaatttaaatattaatggctgggcacagtggctcactcctgtaatcccagcactttgggaggctgaggcaggaggattgcttgaacgcaggagtttgagaccagcctgggcaacatagtgagaccccgcctcaaaaaaaaaaaaccacaacactattagctaggcatggtggtgtgcacctgtagtcctagctactggggaggctgagatgagagaattgcttgaacccagaaaatcgaggttgcagtgagccatgatcacaccactgcacttcagcccaggtgacagagcaagactgtctcttaaagaaaaaattaatttttaatggctgggcacagtagctcatgcctgtaaccccaacactttgggaggccaaagtgggcagatcacctgaggtcaggagtttgagaccaggaaactgaccaacatgacgaaacccagtctctactaacaatacaataattagtcagctgtggcagcacgcacctgtaatcccagctactcaggaggctaaggcaggagaatggctttcacccaggagatggaggtcgcagtgagctgagatcacaccactgcattccaacctgggggacagagtgagactctgtctcaaaaaatatatatatatattgataatagtaaacaggatagttttcattttaatggagtcttctttttaaattaaattgagatatatttgttttctactagttaagttccttaagaaaatggaactgttatcttcttttaaaatgaatctggcagatctttaactggtttgtctaactctgattatcatggcaacctctgccaaactacttcaaaattccactggctttggccttgacttttgcaatatctcccttaaccagtctttctgctcctgctttcctccattttccgtggagcaggcagattcatttttatttttttatttttaatttttttaccctgaagtatagattcaagctgtcctgaatatatacagattcatatttagaaaatatctcagattctgctatgcaccttaaaaatcatctaatgagccaggtgtggtggctcatgcctattatctcagcactttgggaggccgaggcaggtggatcacttgaggtcaggagttcgagaccagcctgggcaacatgacgaaccctcatctctacaaaaaatacaaaaaattagctgggtgaagtggcgtgcacctgcagttccagctacttgagaggctgaggtgggagaatcacctgagcccaggagttcggggctgctgtgggtcatgactgcacccctgcactccagcctggttgacagggtgagaatctgtctcagaaaatagatgtatatcatccagtgatttctactttcacttagaataaagtccaaactttttaatgcagtcctgtaaggccctccacaatctagcccttacttcccttttatgctactctctccttcattgctctctctataagaaggctctgacctgggcattatccccataaccatgtatatttgtacattttttgtcctgtctcttgggctagaaaagaatcatcatgaaggcaggggatttgtcttccttcttgctgtatccccagtggctagaacagacctggcacaaaagaggcactcaggtatttcttaaaagaatgaatgagttcaagctagttcagtttgtttagactttccttgttttccaaaccactcctctttgtcataaaaatttgatcatttttctgtattattattattattatttttattttattttttttgagatggagtctcgctttgtcgcccaggctggagtgcagtggcgcgatctcggctcactgcaagctccacctcccaggttcaggccagtctcctgcctcagtctcccgagtagctgggactacaggtgcccaccaccacgcccggctaatttttttttttttttttttgtatttttagtagagatggggtttcaccatgttaggcaggatggtctcgatctcctgacttcatgatctgccttcctcggcctcccaaagtgctgggattacaggagtgagccaccgcgcccggcctattattatttttttgagacagggtcttgctctgtcgcccaggctggagtacagtggtgccatcttggctcactgtaacctcagcctcccaagtagctgggatgacaggcatgcaccaccatgtctggctaatttttgtaaattttttttttttttttttttttttttagtagagagggtttcactgtgttggccaggctggtctggaactgctgacctcaagtgatccacccacctcggcctcccaaatactgggattataggtgtgaaccaccatgcctggcctgctctttttttatttttttgaggcagagtctcaccctgtcacccaggctgcagtgcagtggcacaatctcggctcgttacagcatcagcctctcaggttcaagcgattctcctgcctcagcctcccaagtaactgggattacaggcgcataccaccacgcctggctaatttttgtatttttagtagagacagggtttcaccatgttggccaggctggttttgaactcctgacctcaaatgatccacccaccttggcctcctgaagtgctgggatcacagtcatgcaccactatgcctggcctaagatcattttaaaaccatattgctaatcccagcacttgagaggttaaggcgggagacttgcttgaccccaggagtttgagattggcctgggcaacatagtgagaccctgcctctacttttttttaactattaaaaaaaaaagccatattgctttccattctggtctttgttggaatgatatttaaagattaaactggccgggcgcggtggctcacacctgtaatcccacactttgggaggccaaggtgggtggctcaaaggtcaagagttcgacaccagcctgactgacatggtgaaaccctgtccctactaaacatacaaaatttagctgggcatggtggcgtgtgactgtaatcccagctactcaggaggctgaggcaggagaatcacttgaacccaggaggcggagggtgcagtgagcggagattgcgcactgcactccagcctgggcgatagagtgagactccatttcaaaaaaaaaaaaaaagattaaactgctccagtttcaattacactgtgtttactacctgggtaatattctatggccagggatgttcaaacacccattgaggtgaactgcatcttttctgggcccacttctgatgcgtgtaggctttaatgaaaattgcttaataagggtggggcgcagtggctcacgcctgtaatcccagcactttgggaggctgaggcgggcggatcacaaggtcaggagatcgagaccatcctggctaacacggtgaaacctcgtctctactaaaaatacaaaaaattagccaggcgtggtggcaggtgcctgtagtcccagttactcgggaggccgagccagaagaatggcatgaatccgggaggcggagtttgcagtgagccgaaatcatgccactgcaccccagcctgggtgacagagtgagactcccatctcaaaaaacaaaaaagaaaaagaaaattccttaataagtatttagtgcttagataaaagaagttaagctgtctttaaatgcagagaaagtcaaagttcaaacatccctggccatagagtccattctgcataaagagtctattctgttcgtacagagtcctttctataacatcctcacatatgtactgaaacctattctctgctgtcctttattgctgcaccagttggttactagtgttgatctcgtttgaaggagaaggatagctgagcgatagcttttgttctgcaggccacatcatctgcatgtgggcaatgaaattgtcctttggaacagtgtttagctatttcgccaaatgctaaagttttccagttaaaaatataactccatagttaccttcctccccctagtgtattctaatttcaataacttaggaagagccaacaacgcttcttactaaagaaacataaaaatgaggagtagttctctttgccacttgaagcagggggtgtttgttatcaagaaaaatagccagtatggctggtagattggtaattggaaccagagaatgttatttctgcttcatgaatattaggaatttgctgtcatttggaactagatgttcaaaagatgtgatgaaaagacacatttgtagcctggataaatctggataatttgttctatagtgatgaattatgttttccatggatgacctgcttagaagcatggagtctcagaactgtggcatattctattgaactggatcagaaggccttctgtccttgtggataattgtggtcttgcttttagtttttatagattacttcaatatttctcaggcaaaatagaagaaatagagaccattagtcggttggctaatgaaggataagttttttgtcctccatattaataacatactaaatgtttgtatcaaatgtatttatattacattttatacattttattataaattttatttgtaattatttgttataagttttattataaaatacaatgttttatatgcatttgtcctataacttttatagtaaatatgaagtttaattagtgtaatttaagaagagcttgggatttttgtttcctcataaacaatctttattttctgaagcagttaaaaatatatagtgtttatatcatatttgccattattaagatacctttttgattgtaagcatatttaaatagtttttagaatttaatattctaaaatgtttcattatctttagcatagtctgggtgtggtggctcatgcctgtaatctcagcactttgggaggccgaggcgggtgaatcacttgagcccagcagttctatatatatatatatatatatatatatatatatatatatatatatgtgtgtgtgtgtgtgtgtgtgtgtgtatacacacatgcatacatacatacactcacacacatatatatacacacatacacatatatatacacatatatatacacacacacacacacatatatatatagagagaagagagtctcactctgttgcccaggctggagtgcagtggcatgatctcggctcactgtaacctccgcctcctgagttcaagtgattctcttgcctcagcctccatagtagctgggattataggcatgtgccatcatgcctggctaattctttgtatttttttagtagagatgggttttgccatgttggccaagctggtcttgaattcctggcctcaattgatccacgtgcctcagcctcccaaagtgctggtattacaggtgtgagccactgcccctggccaaaatattaattttttaaaaatagcttaaaagtggcttttacacttgctgctttattattcctttgatagtctcacatagggttaggtagggaggccctaaggagaacaaaaagccctagtttagatttactgaaggattttttgactaagtcacatttgtctgatcctttattaaagtagctgttatttcactgctcttccaaaaggaaacacaaaaatgatactgatgaagatgtgctattttttttccataaattcactgtaatctgtccctttccaattttgaacttttgctgctaatgaactttttttttttttcatgtgtaagatgcaagaagacctcttttctaaatggtccatatttattagtactctagtcagagaaatccaaagtctaccatattggaggttttctggaattccaggctgtctgttagactgtagtctttaaagccttgccttatcatactgggccaggtttgtgtgggagataggcctacagctagaccagcaaaggtgctgagagaggaaccctgtcctcctacctggtactttgtgagtgagagatactgatacagacagtggaaagaagagctggatatctcattctcatcaggaagattatacagttctatgatttgggatatgtcataggcatcagagtacaaagcaggaactgaggccaccagcctctcccactgagtatcttgcatttggaagtcacttgtgggactctcagtgaaggtagagttccatgcccaattggaagggtctaagagctgaggtggaagggagctgtagaaatctgaaaccacgggagaaaaagcataagcactgggggatgttctgggggaggtgggcacattcttcttggatggaaggtatctggtttggttgctttgctgattgctgctgctgctgctgctgctgcttcaatttgaatcgccggttcctaaaccaaacctgggagtgggggaagaggggagattgtggtctgttcttggagaaggcattccaggcttctcctgagtgaaaacagccaggttatcatctcacatcctctccaatttaccatgacactgggttctttactgttgactctggtaggttgagtttcaaagctagtttctcctgaagatttctgtctgggaacatggtctggctaaacagagcttctagttctttatactgttggcgggtgaatgaagtacattcttgatgccttctccatattgctgtagtcccagatacttgggaggctaaggtgggaggatcacttgaacctgggaggttgaggctgcagtgagccaagactgcaccactgcactccagtttggatgacagagtgaaactgggactagctggatcctgtggtggtatcaccttcatgttggaatcattcctgttgatgaaagagtctagctagggattctctggggccattctgttcatcatggtttctgaaatctgtcatgaatccccttagaccattttcagtcctgcgcggtgtgtctctctctcaatgaactttttaaaaaaaggaaatcatggcccggagcagtggctcacgcctgtaattccagcactttgggaggccgaggtgggcagatcacgaggtcaggagttcaagaccagcctggccaacatagtgaaaccccatacctactaaaaatacaaaaaattagccgggcatggtggtgggcgcctgtaatcccagctacattggaggctgaggcaggagaattgcttgaacccgggaggcggaggttgcaatgagctgagattgcaccattgcactccagcctgggcgacagagcgagactccgtctcaaaaaaaaaaaaaaaaaaaaggaaatcactcttggattttaatgtggaagagattcacgttctttgatttttagaagatcttttattgtacaattacttcacaaactagatggtattttttataatgtagtgagtgctaaattacctcaaattcttttccagataaggcaggatatgaataaattttttaaaatcacactttaaaagatagtgactgatacaaataacttaaacagaattgcccccactctttgttaccactgtgttgtgtgtctgtatgttcaagcgtgagtaaagctacttgattattgttgtctttacgacaccttctctcctgccagagtgttttctttcctatctctgaggcctgccctgctggaatagacctggtgtactttggcgggagcctgctgctacacaggcagccagaactgaccttcagactaatgagcagagctgtgaagaaatctgaagttcctcataatgttggttgtctgttctgaaaatatcattgcagacatagggagtccatgggaaaagcagaaggagactgtgactgggaaaaagtttgttctaatgagttttaagaagagagatgaaggtcttttctctcttggaccttcagacacccacttgggtctctagcaagtaaatttttcatttgtttcctcttataaagccttttaaaataaacttccacttctgctctgaaaaaaaaaagagagagagagatgaggaagaatggatgagttttaagggccatggtgagggagggaacttcaaggggaacaaaacatctcttgaaagcctgaattttgctaagagatcctatgtgattgggattaaggaacaagtgctttcttggaaaccagtagcctttcagtgttggggattggcttaattttgatcacattatttatctttttttttttttctttttgagacagggcctcactcggttgtccaggctggaatgtagtggcgtgatcatggctcactgtagcttcgacttcctgggctcaggtgattctcccatctcaaccttccgaatacctgcatataggcatgcatcgccatgcctggctaatttttaaattttttgtagagatagagtttcaccatgttgtccaggctggtctagaactcctgggctcaagtgatgtgcctgcctcagcctcccaaagtgctgagattacaggcgtgagccgcctcacttggcctgtttaacattttttgaattgtggactaaaaggtaggtttttttttctttctgaaactgatgagggccttagagtggtggaacaagagcaaaattttaaaaagataattctgaaaaggggattatgagaagaatcagggtcttaagcatattaaggtaggcacatttcttatggacctagagtgggactgagttattgaatgtcagcttcatttttgccatccttagtatagtagatgaaggatgagaatatggagatatttgaaatatccaggtagctgggctctgtggctcatgcctataatgccagcactttgggaggccaatgcaggaggatagcttgaggctagaagtttgagaccagtctggggaacataatgagaacctatctgtacaaacaatttttaaaattagctgggtaaggtggcatgcacctgtagtctcagctacttgggaagctgaggcgagaggatcacttgagccaggagttcaaagctgcagtgagctatgatcatgccactgtactcttgcctgggcaaaagagtgagaccctgtctcaaaaaagaaaagtgtaaaatatccaggatagctctttagaaatggaaaagttcctggaaatatccatgctggtggtagttgtgattatggagacactccaggaaaagcagacatctctactgggaatagtcaggtgcagaagttcagaggtcttagaaattatataggcattgtatcctttaaaaggccttgctgttttgagtacctgggagttatactactgctaaaataaattacataaagtacagggcttggtggacttgatgggacttcataacagaggcattctgtctgtgatccacagagagctctgtctgctgtgtattattcatataaaccaattgtaaagttgaaaaatcaggggacaggcgtggtggctcatacctttagtcccagaactttgggaggccaaggtgggaggattgcttgagcccagaagttcaagagcaatctgggcaacatagtgagactttgtctctaaaaaaaaaaaaagagaaaaggggccaggcacaatggctcatgcctgtaaccccagcacttgagaggccaaggcaagagactcacttgagcccaggggtttgaggccagcctggacaacatagggagaccccgtctctacgagaaattaaaaaaaaaaaaaggccaggcgcagtggctcacgcctgtaatcccagcactttgggaggctgaggtgggcagatcacgaggtcaggagatcaagaccatcctggctaacacagtgaaactccgtctctactaaaaaaaaaaatacaaaaaaattagccaggtgtggtggcaggcgcctgtagtcccagctactcgggaggctgaggcaggagaatggtgtgaccctgggaggcagagcttacggtgagcagagacggcgccactgcactccagcctgggcgacagagcaaggctccatctcaaaaaaaaaaaaaaaaaaaaaattgaccgggtgcagtggctcatgcttgtaaacctggcactttgggaggctgaggtgggtggatcacttgaggtcaggagttcgaggccagcctggccaacatggtgaaaccatgtctttactaaaaatacaaaaaaattagccgggcatggtggcacatgcctgtaatcccagctactcgggaggatgaggaaggataattgcttgaacccaggaggcggaggttgcagtgagccgtgatcgtgccatgcactccagcttgggcaacagagcaaggatccatctaaaaaaaaaaaaaaaattagctgagtgatggagtggtaattagctgagtgacggagtggtgtgtgcctgtggtcccacctacttgagaggctgaggcaggaggatcacctggggccaggaagttgaggttgcagtgagctgtgattgcaccactgcactgcagcctggacaacagaacaagatcctgtctcaaaaaagaaaagaaaaagaaaaacagaactatggtaagtcagggactgtctttctgtgttgttagcattaaatgcattctctttttttttgagatggagtctcgctctgtcgcccaggctggatggagtgcagtggcgcgatctcggctcactgcaagctccgcctcctgggttcacgccattctcctgcctcagcctcccgtgtagctgtgactacaggtgcccaccaccacgcctggctaatttttttgtatttttagtagagacagggtttcaccatgttaaccaggatggtctcgatctcctgaccctgtgatctgccagccttggcctcccaaagtgctgggattacaggtttgagccactgcgcccagcctaaatgcattttcttttctttttctttctttctttctttttttttttttttttaagttttggttgccagggaggatcctaacacatttcaaaaaattttttgagacaaggtctcactctgttgcccaagctggagtgcagtggctcaatcatggctcactgcagcttcgacttcccaggctccagggatcctcccaccttagcctcccgattacctgagactatgggtgtgtgccaccatgcctggctaattttttattttctgtagacatagggtctcactttgttgtccaggctgatcttgaactcttgggctcaagtgattctcccacctcagcctcccaaactgctgggattacagacatgagccactgcatctggtctaagtatatttttaacttatattttcaacttatgatgggtttatggggaagaaatcctatcataagtgaaggagcatctgtgttttgcttccatggtgcataatcatctggaatcaggatgtactactatgaatgttgacaggaatactaccttgagctagctgaaggtttgggattgctggaaccttaagcaagggcatgataaatgtagttatttaaggaaaaagggttatgaaatgttgcatgtaagttggcaagatctgaaaattccgggacccaacattggcttggtgagttctactttgttcttgtagctagatgaatgtttctgccaaatcactttcccacacacagttaaaacatacagtttgcagatctctctgccatttctagggtactatatcttacgtagtggtgtgtgaatgtgtgttttgagacagggtctcgctgtgtcacccatcctggaccagcttggcgtgcagtggtgtgatcatggctcactgcagcctcaacctcctgggctcagatgatcctcccacctcagcctctcaagtagctgggactacaagcacacgccaccatgcctggctaatttttaaaattatttttggtagaggcggggtctcactgtgttgcccaggctcgttttgaactcctgggctcaagtgatcccctcacctcagcctcccaaagtgctgggattatgggcatgagctgccatgcccagcccttaatgttaatgtgcactttttctcatgttacagacctgttttctaggtgtgctccatggaagtttaagcatatgccgtaagcatttagataacatctagtccacctatccccaccttttctttttttaactgatttaactggtgagaaaaattgaggcccagagagagttgtaactcagggtcatactgttaatggcaaaagccggttcctgaatccagattttctggcccaggccagtgctcattttaacacctttaattcaaactgatcattgtcatgacatttaccatttgtgtacttaatgtgtgacaggtgttgtgctaagcattatatagctctcatcttgattaatcctcttaacaattctatgaggctggccagtattttatagatgaataagcagccttgatgacttgcctgaagaagcacagctagtaagtgctggaactaagatttcagcccaattctgtgtagttccaaagcctgtgttgttttttcttcttttcttttttgattaaatatttatgtaaaaggtaataaagaataatatgacaaatactcaacacccagcttaagaaataaagtattaccaatcatttgaagctcccttcccattacattgtcctctcttttcctccaaagtaatcatccgcattcctgagtttcaaatttgtgctcctaaccaccaagctatacagctgcatttattaagtgccatgggagctggagccactgttattcaacagtaaacaagaaagacatgttttctgcccttgaggagtttcctatgggtgataatgaaatatttgtttcttaatctttctggagatcttcagtagctggtacgaaatgtgacatcaaggaggtttaagaagtccttcaggagatcactggtgatatgttggaaggttgcctagatattacacaaatgaatcagagttaagaatacatgtgttggctgggcgcagtagctcatgcctataatccatttgggaggtcgaggcgggtgcatcatgaggttagggttcaagaccagcctggccaacatggtgaaaccccgtttctactaaaaatgcaaaaattagccaggtgtggtggtgcacacctgtgatcccagctactcagaaggctgagagacaggagaatcagcttgaacccaggaggtggaggttgcagtgagctgagatcatgccattgtactccagcctgggtgacatagcaagactgtcccccgctcccaccccgccgcccagaaaaaaaaaaaagaatacgtgtgtcttaattggatcactgattattttttcttcctagagaccaagttatagattgggtgttttgttttccgacaaggtcttgctctttcatggctcactgcagcctcaacttcctgggctcaagtgatcctcccacctcagcctcctgagtatctaggaatccaggccctgctagtttttgtatttcttatagagacagaatctcgccacattgcccaggctggtctcaaactcctgggctgaagtgatctgcctgcctcagcctcccaaagtgctgggattacaggcatgagccactctgtgctcagccttgtcttagttaatatattttccatattatccccacatagtatgtaagacaaaactttgtccttagaagacaatcaggtcaataattataaaatgaactaatagtaggagtctagacaaaaaagatgggtcatgtagaagcgtaagttaataccctgcatgttctagtgttttccctagtttgttataggcagggtagacatgagtctgggtggaactagtgctcttggataaaaaatctattacagtgtttctcagtttttgtttgtttgttttttgtttttttgagacagagtctccctctgtcgtcgttttttgagacagagtcttgctctgtcaccaggctggagtgcggtggcgccatgcaatctcggctcactgcaacacctgcctcccgctttcaaacgattctcctgccgcagcctccctagtagctaggactacaagcacatgccaccacgcccggctaatttttgtatttttagtagagacggggtttcaccatgttggccaggctggtcttgatctcttgacctcgtgatccgcccacctcagcctcccaaagtgctgggattgcaggcatgagccagcgtgtccggccgtttcttggtattttagctataagttcttttgataaatacagagctcacgtaccctctgagttccgacaccaattttcctataccaactgagtgtcatacaattcaattcaattctaatgatggcagtggcggccatctggagtggccatcagctgcagcagggaggcgcaagcggtggcagcaggagtggctgctggagcagcagtggtggtggtgggacccctgtgccctgcatccctgaggcagctgagtgcatcactcctacctcacatggctgggcaggacctgcttccaggcctggagcctccactatggcctcaacctctccccacaccgtgtctcaggagcccatgagcacccggctgaaggcgcagctgggactcgtggggccagcctcaagatcatcgggtttgtttgtgcggggttggccggggctgccacgccacctgtacctctcctgctcctgctgcagggaaaatgtggagaggaggcatgtagtccccagagcccacacctgggagccccctggagcctgatatccccagagccaccatgatggggccgggccgagttacccgttggcaggggagcagtgtgatcaggcatggaggggtggacagagaggagccccgaggtggagctgggccctgagcggtgccgcgctccatggagctggcaggagctggaagctggcaagagccccacctcccagtcgcagctgcagctgcccagccgtggctgtggacccaggcatctctgcagtctaaggggcccaggaagcctgtgggcttggagatgtctgctcctgctgcctggcctctccctgctcctggtgcccgttctgatctcagagcgaggttggggccaagcctgggtgctgttgcagcctgaccgggtgtgcgcatgcttgggacagtggtgacatgccaggcccctgccactttggcctcctctagacttcaggcactggcgagcatgggagggaggctgagatggggactgagggcagcttggtgtaggcctgcaggtaccctttggcatggccttggcagcttgaatgccagcaggaggcagacaggctcctgggcagaagggggcagatgccccgtgaagccccaccttcaggctgggagggcctgaagcccgggggctgggttgctgatcccgcagaccagtgtgggaacttgtgacgcgggtcctcccatggctgcccatggaccaatcggcacactcttcttcccctctgaggcccataaaaagcctcccggactctgccagaccagaagagagacgacggcatgacctgcctacagggaggaactaccctctctgctgagagctgaaggggtgacaggatgatctgcctgcagagaggagctaccctctctcctgagaactgaagagacgttgggatgacctgcctgcagagaggaactaccctctctgctgagagctgaacattcttcgggacagcctgccaagcagagaggagctatcctctctgctgagaactgaacacttgttgggacaccctggctacagagaggaggtactcactgtaggtttcctctgagctgttgtgtcgctcagtaaagctcctgtttgtcttgctcagcctccacttgtctgttacctcattcttcctggatgcaggacaagaactcgggacctgctgaatggtggggctaaaagagctgtaacacaaacagggttgaaacatgccccttgcttgctaccttgagagtgtagagaaggagagaagagctgcagtccttcagggagcccagacctgggagctcccttagccagggctgtgactccctctttggggccctgtggttcctggagtcgccaagcttccgggcaccactgtgttctccagtgccagctgtggaagctgcttgtgatgcgcctggtccagttgcagcctcgcagggagatggtgcccaagctggcatctggagctgcccaccccacagcagcagccggcgtgcctggctgtgcacagaggtcagaccccatgcttgctcacacatccctcaccactttgtgcctggctcacctttggcaggcgtgggatccaggctggtcgtgtgagttgagcacagcctgccaggctgagtgggtggaacgagcccagtgggccagagcaaaacttggacagaggcaccactggccacagaagtttccagttggtgaagtgactccccaacgatcccgtaacactgacaccacccagagttagcttcagatccactatagttgcccagtgggttcttctgcctgctacacagacagaccaattcactgagaccacagtattgtagtaaagaaataacttaattaacacaaggctggccatgcaggagaactaaatgtatcacgcaaattagtctcccagaaggctcagaggtttgggtttttcaaggatagtttggtgggtgggggctagagaatggaggatgttgattggttgaggatgaaatcatcgggatgtggaaaacgttcctcgtgctcagtcagccgctgattgggggccacaggatcgactgagtcacaagttgtgggttccggtagagtcagtccttcaccagaaatgcaaaaatatgaaaaacatctcaaaatgccaattgtaggctctattatcgtgatgttatcacaggagtaactggggaaagttacaaatctcctgacctccagaacaatggttggttatcatttacacctgtatcttagcagaattcaggtccctcacataatcctaaccttgtggcctttcactagttttacaaaggtggtttagttttaggaagtgctattatcattcttgctttaagattaaacagtaaacttaaattcctctcaaggttatcttggcctgttcccaggaatgaccagggacagcttggaggttagaagcaagatggagtcaactatgtcagatttctcttactgtcataattttgcaaaggcagtttcaccaccagttaaagagcaaggtttccaacaacattgcccttacttcagcagcatgcactttggcctgaccaaccacaaattcagggcttcctactaccccctcagactagagtgagtcacaaaactcgggaaagtgctatattcacgattatacaaatgaacaaccagattgaagaggtacatggggaaaggtctggaagagtcccgagctcaggagcttctttctctgtagggtcagggtgcaccaccttcctggtacattgacctgttcaccaaccaggaagctctcctgagctttgatgttcggagtttttatatgggttttcagtaggtagatgtgattaagtcattggccacgtgcttgactccagctgtttccctgttggaggttttggggtggggctgagagttctgaccctctaatcatgtagttggtttttctggtgaccagctcccatcctgctagcatgctctgttgccccctcctccccacgtgagtcacctcattaggatgaactctgtggttgaaagggactcattattcataataaaagacactcctatcatataggaaattccaagggattctgatgctctgtgccagaagctggggacaaagaccagatgtattctatgttatatcattccctcctttatattatttgaaattttaacattttattttttaccaaaaacaaattgaacacagtaattttagcatatgtttatattttaactgcctcagtagcgacctgttattcccagttctccggttgctgttaagaaaatctttgaatgctagttccagaatctccaggaggtgggaccagtttcgttagtggtgatgtcgaaaataacagcagtaccactgtgcttgggccaggtgaaatcaaatcagatgattcagtctggttgatgtgctagaggcccttttcccattcatgtaaaattggaaaattttgttcactatccaagtgtttccaaatatttggttattgtgtcaatgtagattcatacatattaagtatgtatcttgggtataaatttaagttataatttaatataaattgtgtggcacaaaagtagttcaaaggaggaagtggaggaaataagagctataggtagaatttgaaccatccttgaaagataattattaataacatttgggaaagtagaggggaaagcaggaatgatgtttagatgagggaaactgtgaggtgggcaggatttatcatggcttgtttgcacttaaacaatgcagaatggccttatttgagcaaattgagtgggggatagtgggaaatgagattaggtaggtgagctagggatagattatttatgatattcaaaggccagtagaatgatttcattttggtgtggtagataattgagagtcaaagaaagcgtttgatcaggtgagtcagaaaatgaaaagagcatgtaagaaaaatggaccagcatttatattgttggtagattaatgaggagagagactggagaaagggataggaaatttgggactgggagatttttcaataaaagtaccataattagggaaataggggaacagtgagggaaggaatgaatgttaaaaatttcaaaggaaaatttgacagatcttgactgctaaatgcagaagaatgatgaatcggagatggtacatttttaaaatttttctttttatccagatatgtaaaaagaatgttaaccaaggctgggtgtggtggctcacgcctggtaatcccagcattttgggaggccaaggtgggcagatcacaaggtcaagagttcgagaccagcctggccaatatggtaaaatcccgtctctactaaaaatacaaaaattagccagcgtgatggtgcgcacctgtaatcccagctactttggaggctgaggcaggagaatcactataatctgggaggcagaggttgcagtgagctgagatcgtgccactgcactccagcttgggtgacagagcaagactccatctcaaaaaaaaagaaagggaaaaaaaaaacaaagaatgttaactatattggtgataactatctaagtctgttacaatgtaatgtaaaagtagagaggacctagtggccatgatcagtggtatccccaggatgaagaatagtgcctggtggccaggcgtggtggctcacccctgtaatcccagcactttgggaggccgaggcaggtggatcacgaggtcaagagatcgagaccatcctggccaacatggtgaaaccctgtctctaataaaaatacaaaaattagccagacgtggtggtgtgcacctgtagtcccagctactagggaggctgaggcaggagaattgcttgaatccaggaggcggaggttgcagtgaaccaagatcgcgccactgcgcgaaaagaatagtgcctggcttatagaattgcttaaaaaatatttatcaaaggatgaaagaatgcatttaacctgtcaacttttgggtaaattttagttgtcatctttaacatcccaatttttttctttttttagacggagtgtcgctccgtcgccaggctggagtgcagtggcgccgtcttggctcactgcagcctctgcctcccgggttcaagcgattcttctgcctcagccttccaagcagctgggactacaggcgtgtgccaccatgctcagctaatttttgtatttttagtagagacggggtttcaccatgttgaccaggatggtcttgatctcttgacctcatgatccgcccacctcggcctcccaaagtgctagaattacaggcgtgagccaccgtgcccagactaacatcccaatttttaataccaaaaattaccttaaaaataatacttactgaggctgaatgtggtggcttacacctgtagtcccagcactttgggaggctgaggcagatggatgtcgagcccaggaattcaagaccagcctgggcaacatagtgaaaccctgtctctactaaaaatacaaaaaattagccaggtatatagtagtgcacacctgtagtcccagctacccaggaggctgaggtgggaggatcgttgatcctggaaggtcaaaacttcagtggtctgtgatggcaccactgcacttcagcctgggtgacagagtgataccctgtctcaaaaataaataagctgggtgtggtggctcacacctataatcccagcacttagggaggccaaggcaggtggatcacttcaggccaggagttcaagaccagcctggccaacatggtgaaactccctctctactaacaacaacaacagcaaaacaaaaaacaaaaaaacaaaacaaaacaaaaaaaacagggccgggcgtgggcgtggtggcttacgcctgtaatcccagcactttgggaggccaaggcaggcggatcacaaggtcagatcgagaccatcctggctaacacggtgaaaccccatctctactaaaaatacaaaaaattagctgggcacggtggcaggtgcctgtagtcccagctacttgggaggctgaggcaggagaatggcgtaaacccaagaggcagagcttgcaataagccgaaatcgcgccactgcactccagcctgggcgacagagcaagactccgtctcaaaaaaaaaaaaaaaaaaaaaaaaaacaatacaaaaattagccaggcatggtggcacatgcctgtaatcccagctactcaagagactgaggcacaagaatggcttgaacctgggaggtggaagttgcagtgaaccaagatcgtgccactgcactccagcctgagtgatcgagagagaccctgtctcaaaaaaaaaaaaagttactgatcttttctagttaaaaaatttttgtgtttattttccaagataaccactttagtataatatattcatccagtggttttttctatgcacatacatatttatctttaaaatgggatcatattgcacatgttgacttatacctgcataaatatcatttttagaagtaaaatggaacttgaacctccaaataatgacaaaccataaaataataggataatagaggaatctgttagtctatactcatatataaataagtaaacaggcatacctcagagaaactgtgagtttggttctacactaccacagtaaagtggctcacaaatttttttgttttcccagtgcatataaaagttatgtttataggctaggtgtggtggtgcatgcctgtaatcccagcattttgggatgccaagatgggcggatctcctgagaccaggagtttgagacctgcatggccaacaaggcgaaaccccatctctactaaaaatacaaaaaaatgtagccaggcatggtggcacatgcttggaatctcagccactcgagtggctgagacatgaaaatcgcttgaacctgggtggcagaggttgcagtgagccaagattgtgccactgcactccagcttgggtgacacagcgagactctatctcaaaaaaaaaaaaaaaaagttatgttcatactatactgtagtctgttaagtgtgtaatgtaatatctaaaaaatgtacataccttaatttaaaaatactttattgtcaaaaaatgctaatgatcatctgagccttcagtgagttgtaacctttttgctggtggagagtcttgcctcagggttgatggctgctgactgattagggtggtgattcctgaaggctggggtggctgtggcaatttcttaaaataagacaactatgacatttgctgcatcgattgactcttcctttcactaaagatttctctgtagcatgtgatgccatttaatagcattttacccacagtggaacttctttcagaattggagtcaatcctctcaaaccctactgctgctttatcaactaagtttatgtaatattccaggtcctttgttgtcatttcaatattgctcacagcatcttcaccagtagattctgtctcaagaaaccacattctttgctcatccataataaactcttcatctgttcaagttttattatgagattgcagcaatttagtcacatttttaggcttcacttctaattctagctcttttcttgctatttccaccatatctgcaattccttcattgaggcttgaatccctcaaagtcatgtgagggttggaaccaacttcttccaaactcctgataatgttactttgatctcctgtgaatcacaaatgttcttgatggcatctagaatggtgaattatttccagaaggtttttagtttactttgcccacatccatcagaggaatcactatctatggcagctatatataggcttacacaatgtaaatagtaagcctaaataataaggcttgaaagttataattactccttgaaccatggactgcagactggatgtcatgttagcaggcacgaaaataatctccttgtacgtctccatctgagctcttgggtgaccaggtgtattgtcagtgagcagtaatattttgaaaggaatcttttttttttttgaggagtaggtctcaacagtagccttaaaatattcaataaaccattctgtaaacaaatgtgctgtcatccaggctttgttattccatttatagagcacaggcagaatagattgagcataattttttttttttttttgagacggagtctcgctctgtcgcccaggctagagtgcagtagtgcaatcttggctcactgcaagctccgcctcccgggttcacaccattctcctgcctcagcctcccgagtagctgggactacaggcacccaccacaatgcccggttaatttttgtatttttagtggagcctcccaagtagccgggattacaggcgtgagccaccatgcccggccagattgagcataatttttaagggccctaggattttcagactggcaaatgaccactggcttccacttaaaggcagcaacctgcattagcccctaacaagagtcagcctatccttttaagcattgaaaccaggcattgatatctgctctctagctatcgatggcatcttcttctgatacaaggctgtttcatctacatcgaaaatcttggttgggtcgtataataccagcaacttgggagaccaagacaggaggattgcttgaggccaggagtttaagatcatcttgggcaacatggtgagaccctgtccgtacaaagaattaaaaaattcactggatgtggtggcgtggcctgtgatactagctactcaggaggctaaggcaggaggattgcttgagcccaggagtttgaggctacagtgagctatgatcatcccactatgctctagcctaggtgacagagacccccatctctaaggaaaaaaagaaaaggaaacatttgtttacagaatggcttattgaatattttaaggctactgttgagacctactcctcaaaaaaaaaaaagattcctttcaaaatattactgctcactgacaatacacctggtcacccaagagctcagatggagacgtacaaggagattattttcgtgcctgctaacatgacatccagttatgtcatgcacacacacacacactcacatacacatgcatgtattttttcctccagacagagtttcaccatgtcaccccggctggagtgcaatggtaagatcatggtgctctgtgtggcctccaactcctgggctcaagcagtcctcctgcctcagcctcgcaagtagctgggactacaagtgtgtgccaccacacctggctaattttttaaaaactgttttgtagagacagggtgtcattatgttacctaggctggtctcaaactcctggcctcaagtagtcctcccacttcagcctcacaaagtgctggaattacaggcatgagccactgcaccagacatatatatatacacacacacaaacacatatatgtaatatataatatttatatatataaatatatttttatatattttatatatacgcctcataaattattctgatgcatggctttagaggtcaccattccctttcggtgttgttaacttgtattagcaatattttttaaagtatggcacaagaaagagaaagcattggcttggccatcaggagatgggttattctcttaaatctgcaactaatcttttagtaagacttagaaaatgactgtctctggatcccagattctttatctgaaaattttctggggagctgaataaactgacattgttaactagattctagcagttctgtgatgatggattcacggacatcatcagaactcagtgaaatgtgacctgtggtcagccatttgaaaaaggcctaaaccttcttacacaagtcaattgaaaaggcctgtagaaatcagagctcgaagacacctgttaaatcatctgatctatccctctaccagcggtactcggttgttcatagccctctctaagctgttttcactctccttcctgtgttccagacattcattattttcccagagactggacttgtgttcacccttttaatcatttaagaagggaatgtgacttttcttaactcaaaaaatttcatttattttatatttagactttaattttggaaactgttgataatggcagagattagtaagcatgtggactgttttcctctagattcacaaaaggatttagttgatgaatgtctaacaatagtaattatatgatcagaaagtgacgggaatacaagtcaaatttcataataaaagttaagattttaaagtttgtgtataaaaaaattgctagaatagaaaatgtaataggagactttctttgcttttaccttgttactaaccctttaaatatgatgctctatggaagaaagaatgtagagatgcagagaaatgagcattctgatattctgtttatgaggatgtaaattggtttattcgtttttggagataatttaacaacatcagttaaaaataaaaaagatcttgtgcactaacttgagttctacttctaggaatttattctgtagaaatactaattgttgcattgtttataaaagtgaaaacttagggccaggtgtggtggctcacacctgtaatcccagcactttgcgaagctgaggcaggtggattgcttgagtcaaggagtttgagaccatcctgggcgacatgacgaaaccctgtccctattaaaaatacaaaaaaaattagctggttgtagtggcatctgcctgtagtcccagctactcgggaggctgaggtgggagaatcacccaagcctggggaggttgaggctgcagtgagccaaaaaaatcacaccactgcactccagcttgggcaatcagagtgggaccctgaatcaaaaaaaaaaagttaaaacttggaaaccattccaatgttccttgttaagagtttattttaataaattataatacatcatgcagtggattctaatacaactatcaaaaataatgcaggatggctgggcgcggtagctcacgcctgtaatcccagcactttgggaggccgaggcaggtagatcacctgaggtcaggggttcgagaccagcctggccaacatggggaaaccctgtctctactaaaaatacaaaaattagctggacgtggtgacacatgcctataatcccagctactttggaggctaaggcacgagaatcgcatgaacccaggtggtggggattgcagtgagccaagattgcgccactgcactctagcctaggcaacggagtgagactccatctcacaaaaaaaaagagatttaaaaaaatattaatataaaatgggtttattattgctgcttttaaaaattggttaaaatacatgtaacaattattttaactgtaagtatacaattcagcagcattaaatttattcataatgttgtgtaaccatcaccactatctgtacttaaaacttttttattatcctcaacaaaaactatgtacccattaaccagtaacttttgtcttctcttctaggagtttttatgtactgacatgaaatactgcccaaatgcataattaagtgataaaggaaaattgcaaagtagtgtgataactatgattccattgtggtaaaatattgcaagttaatataagtataggaaaaatctgggagaatattaaaatgttagtagaggatgttaggagggatttgtacttttacagaatatattttggcaagtttttaaaaaagagtatgtgtgacttttctaaacataaagatatacttttaagtattatactaaaacttaataatttggatgccttagattttagctaatgagtaacagactgccttatgtggttgccaaatttgagcttatgtagaacctaacactttattaaagtaacgatttttcttttcacagctagagttgggaagacatcactgattatgtctctggtcagtgaagaatttccagaagaggtaaacattttgatttccatatttaaattttaaaaaatttatcaaaatcaaattaaaatgaactgaattctgtctcttttggcatgtgttatgtgcttccttttggacagttgagacttttttttctcccttctttagagacagggtctcactctattgcccaggctggagtgcagtggtgccatcatagcccactgcaacctccaactcctggactcaagcaatcctcctgtcttggcctcccaaagtgctgggattacaggcatgtgccactgtgccctgccagttgagactttttaaaaagctaatatttgtttatcacctgtatctatgaaatacagtataggagaaataaccagcctgtgtctaagttcatctaagtcttttgcattttcttcctttgactttgtctaggacctttgtattctctgtgtctcagttgtctcatctataaaatggaagctgaaagggatataaatgtcatataagctctgtgaccctttcttaaaaataaaatgttgctcataaacccaaaacataaaaaagataatgagcattccgtgagttgaagttaaggggaaagatgtgaatccctacttgccttctgcctgacactccctggtctgtgaggtgtttttgtcggaaccactagaattatgatacatatatttgaaaacctttaatatgatctacctgcttcattttacaaatgttgaaacaaactcattccacctttgcctacctcaaaggattgttatgggtctcaaatgagatgaacttaatagcagggaagtgccaccaaaagtagtaaggtggttttattattactggcaataaatttacattttggaagttctagagtgaggagctgttggctaaactttgcataaagttagcatatagttatagggaatgaaatttgtgcaatgggatgaaaatgatttcaaattaccctctttcttgcatagtaggtatcattagtgtcacagtttacatttatccttcctttactctagtttagataggaatatctgtataatttcattgttcaaataggaatttgatgtatcatgtgatagtgttttcaacatttacagctgccaaaagactatttattattattttttgctttttttctcttagacaagatggttaaataagtaattgcttaatttaagaaatgaagtatattttcgtgtattatttgtagaatcagtaacattaatttataattactctgggtataacacctaaaagttttctgtgagagttttagtttagaattgttttagcatactcctcttgattgtggataagggttttgtgtttttggttttttaaaatttagtttttcacttttttagggattgtaagtaatctagaagggtttttaattaatttttaaaaattcagtccttgtgaaaaatggaatcattaaacataaggcttggctgggcgcagtggctcacgcctgtaatcccagcactttgggaggctgaggtggccggatcacttgaggtcaggagttcaagaccagcctggccaacatggtgaaaccccatctctagtaaaatacaaaattagccaggtatggtggcgcatgcctgtaatcccagctacctgggaggctgaggcaggagaatagcttgaacccaggggcagagcttgcagtgagctgagatcgtgccattgcactccagcctgggcaacaagagcaaaactctgtctcaaaaaataaataagtgaatgaaaaacaagcaaacataaggcttatgtagccagtcaattattttctagaggaaatgaatgttgataacctgttggtttatttgcagattgttgtggatttaaatacctcctcatttgcagagtatcttcagccttcaacaaaatagaatgaaaacaacatatttaaaaaatctaacaccgaaacaccaaattaatccaagaatccactgagtctgtgtcacatctgaagtatccttaatgtattgtgtctatgtagatagaaatacgcatttaaaatgtttttatcctatagttttaatatatatttgcatctgtggtaaagcacaaaaataaacacttatatatacaacaaatgggtattggtgagaggggtaatacaagttgagcatcctttatccaaaatgcttgggaccagaagtgtttcagatttcagatttgttcagattttggaatgtttgcattatacttaccagttgagcatttccctaatctgaaaatcagaaatgctccaatgaacatttcctttgagtatcatgttagtgctaaaaagtttagaattttggaacatttcagatttcagattctgggcttagaaatactcagcctgtgatcccagcactttgggaggccgaggcgggtggatcacaaggtcaggagttcaagactagcgtggccaagatggtgaaatcgtgtctctactaaaaatacaaaaattagctgggcgcagtggtaggcgcctgtaatcccagctactcgggaggctgaggcaggagaatcacttgaacctgggcagcagaggttgcagtgagcagagatcgcaccactgcactctagcctggaccatagagtgagactccattaaaaaaaaaaaaagaaaagaaacactcaacctgtgtagataaatttatatcatctattacaagtttgagtgataatattcaaaggtgtttttttttttctatatttgtttgtaaatgaaggttcctccccgggcagaagaaatcaccattccagctgatgtcaccccagagagagttccaacacacattgtagattactcaggtaatgaatatcctcttgtagatgaaggtgtaggttaatttaatagacttgaaaaaagatacttactgagcttttacaaatgttcagagaggtggtcttttctctgtagcagtaaatgatcctttacgattcttatctcatttatgtctgtcaacctctaccctataccccacccagtgcctccatctgacagttcttcgtccccagattactaagttgggttccataatacctgtggctgttgaacacttgaaatgtgactgttctaaatgaaaatgtgctgttaattgtaaaatataactggattttgaagacttagtatgaaaaaaggatgtaaaatatgtcattaatttttctattgagtacatgttgaaatttaaatacttttgatattttgggttaaatgaaaatttaattttaccttttttacttacctttttaaaggttgctactaaaaaattgaaaactatgtatgtggcttgcattatctgtatgttggacagcactgtactgaaagctgagggaggtgaatgacttctgctacaatcagtctcataactagatttatttacagaattattcttcaatatgtgtagccatataattagattcacctcagtattagaattgaagccttaacccattgattacttaacatatggaaagatattaaaaatatggcctgttatttagcatagtataaaataccattgaattcatgtatgatattagtttatatgtcagaagtaacaggcatttttaggggaagatatatgtaacctaaggtggtctaaatcagtatgccagtaattgctttgctcttcaattatttgctttctatcctagctatatcattcatatccctgcatgcgtggaattgcaggcacacccacccattgagaccagttctagctaaagatacatgctagagagggaattctcatcacttcattatcaagctacagttttgcctctgggtcttggttattattactcccacctgctatctagatcttaagcttgtattacccagaatctcacctgccttttgatcctgtgtgtatagactctttgtccgagcttctgactcttcagcacccagtctgctagcttggatttctgaagtcctttgcctgacccttttcaactctggaccagatgctggcctagatttattacacaatgcttctgctgttccatgcctgagttatccttttatagactcgtctttcagggccagctgccttatcgtagttgaaccttttccttcccctggctttcccttgtgtttgctacaccatgtcattttgagggatgttagatgagtgttgcatagaatttagcttggccattagtttttatgaaagtgtctgcaatatgaaacattgacttcctgtcatttgtagaagcagaacagagtgatgaacaacttcatcaagaaatatctcaggtgagctttaaaaaacagaggtgtggggttttgtgtagaaaaacagtgatgattttatgagcctgcctttttcattctctttgtttgttggtttttgtgttttttttgggaccgtgtttcactctgtcacccactctgtcacccagtgcagtggcgcaattttgccttatcgcaacctccatctcgcaggctcaagcgattctcatgcctcagcctcccaagtagctgggattacaggcatgcaccaccatgcccagctaatttttgtattttagtagagatggggttttgccatgttaaccaggctagtctcaaactcctgccctcaagtgatacaccccgtccctttttcattctcttaattaccaaaagttcttttgcagttctttattgttatggctgttactgagtatgtgtttttgctttaagtccttaggaacattttctcttagaggcaagctaattctttttttgtttttttgttttagctgttaaattttttcttcctttcacccgaatatattaataagttgctaattaagtgctgtctatgtttttattatttttagatacgattaatttgttaatttttcttctaggctaatgtcatctgtatagtgtatgccgttaacaacaagcattctattgataaggtaggtgtgatctttttttccctatagttggtttcagtggagtgcttccaaagttgattctcagtttagaattttaggggtctaagggaagagtgttttgtaaagatccttatcatggctaagcgcttgttaattttcattttaggtaacaagtcgatggattcctctcataaatgaaagaacagacaaagacagcaggtattttttcctctctcaaactttttataattaaaaagtttaaagcttgcagaaaaggtacaagaagtagtacattgaacttccctaaatccttcacttaaatttactaggtaacgttttgccacgtttgccttatctatcagtttttctgtctgttcatacacacacccacgtgccttttttggggggattcatttgaggcagtagatatacttgagagcaaagcaagaaacagaactctgatatcatgattcacaacttcagacagattattttggtcataaatcttacatttctcttcctcaaactgctgcttgaaaagtctcagttttatttatttatttatttatttatttatttatttatttatttattttgagacagagtcttgctctgtcgcccaggctggagtataggagcacaatcttggctccttgcagcctccgcctcctggattcaagtgattctcatgcctcagtctcctgagtaactgggactgcaggcatgtaccaccatgcctggctaattttcgtattttttagtagagagggtttcgcacgttggtcagtctggtctcgaactcatgacctcaaatgatctgctcgccttggcctcccaaagtgctgggactacaggcaagagctactgtgcctggcctgaatctttttaaataggaaaatcagactaatatctatatattgtacacatttagtccttttctcaattttttagatttctcttttagttggaagtttttgtgccttgaaacgctaaagatctggttctaaacatatgactatggtcattaaccctctgtcttacatattttggaagggagactgagatgacattatatgtgctgtgagaaatgctgtggcattgtatggcttctcttttatcatggttttaactttgtgatgatttgacaaggtggaaaggaaagaatgaccctttagagctctgctgtccagtgtagtaggctctcgtcagttgtggtgatttaactttaaattaattaaaattaataaaactaaaacttgttcctcggatacacttagccacgtttcaagtgctcatagccacatgtgactaatgcttacagtaatggagagtagagataaagagcatttccatcatcatagaatgttgtattggacagggatgccttgggggatccaatacccatatgttcctaatatctgcttttcttgcttttgcttgcgccatttctaggagggaatctttaagagagggcagttttgccaggtgcggtggctcacgcctgtaatcccagcactttgggaggccgaggcaggcggatcatgaggtcaggagatcgagaccatcctggctaacacagtgaaaccccatctctacaaaaatacaaaaaaattagctgggtgtggtgggaggcgcctgtagtcccagctactcgggaggctgaagcaggagaatggcatgaacccaggaggcggagcttgcagtgagccgagatcacgccactgcactccagcctgggcaacagagcgagactccgtctcaaaaaaaaaaaaaaagagccccatcgagcctgcagatggctgcagcccccagtgacatctttctttctttcttctttttttttttttgagatggagtttccactctgttgcccaggctggagtgcagtggtgcgatcttggctcactgcaacctctgtctcccaggttcatgcaattctcctgcctcagcctcccgagtagctgggattacaggtacccaccaccacacccagctaatttttgtatttttagtagagacggggtttcaccatgttggctaggctggtcttaaactcctgacctcaagtgatccacctgccttggcttctcaaagtgctggaattacaggcatgagccaccgcatgagagatgctgagtcgatcgaccacccagctaggccactcccaaattcctggccggaagaaactacatgaaataataaatgccctccccccccccagtgatctccctctcttgccgagtctggactgtactgccgtgatctcggctcactgcaacctgcctgcctcgggctcccatgattctcctgcctcggcctaccgagtgcctgggattccaggcacgtgccaccactcctgactggtttttgtatttttggtggagacggactttcgccgtgttgaccgggctggtctccagctcctggcctcgggtgatctgcctgccgtggcctcccgaggtgctgggattgcagacggagtctcgctcactcaatgctcagtgttgcccaggccggagtgcagtggtgggatctcggctcgctacaaccttcacctcccagccgcctgccttggcctcccaaagtgctaagattacagcctctgcccgcccgccaccccgtctaggaagtgaggagcatctctgcccggctgcccatcgtctgggatgtgaggagcgcctctgcccggctgccccgaatgggatgtgaggagcgcctctgcccagccgccctgtctgggaggtgaggagcgcctctgcctggctgccccgtctgggaagtgaggagagcctctgcccggctgccaccccgtctaggaagtgaggagcatctctgcctggccaccccgtctgggatgtgaggagcgcctctgcccggccgccaccccatctgggaagtgaggagtgcctctgcccggccgccaccctgtctgggatgtgaggagcgcctctgcccggccgccaccccgtctgggaagtgaggagcgcctctgcctggcagccctgtctgggaagtgaggagcgcctctgcctggccgccccgtctgggaaatgggaagcgcctctgcctggccgccccatctgggaagtggggagcgcctctacttggctgccccgtctgggaaatgggaagcgcctctgcccggccgccccgtctgggaagtgaggagcacctctgcccggccgccaccccgtctgggaagtggggagcacctctacctggccgccccgtctgggaaatgggaagcgcctctgcccggccgccccgtctgggaagtgaggagcgcctctgcccagctgccaccccgtctgggatgtgaggagcgcctctgcctggctgccccatctgggaagtggggagcgcctctacctggctgccccatctgggaaatgggaagcacctctgcccggccaccccatctgggaagtgaggagcgcctctgcccagctgacaccccatctgggatgtgaggagcacctctgcccggccgccccgtctgggaagtgaggagcgcctctgcccggccgccccgtctgggaagtgaggagcgcctctgcccggccgcccatcgtctgggaagtgaggagtgtctctgcccggccaccccgtctgggaagtgaggagcgcctctgcccggctgccccgtctgggaggtgaggagcgtttctgcccggccgcccatcatctgggaagtggggagcccctctgcccggctgccccgtctgggaagtggggagcgcctctgcccagccaccccatctgggaagtgaggaacgcctctgcccggccaccccgtctgggaagtggggagcgcctctgcctggccgcccatcgtctgggaagtggggagcgcctctacctggctgccccatctgggaaatgggaagcgcctctgcccggccaccccatctgggaagtgaggagcgcctctgcccagctgacaccccatctgggatgtgaggagcacctctgcccggccgccccgtctgggaagtgaggagcgcctctgcccggccgccccgtctgggaagtgaggagcgtctctgcccagccacccatcgtctgggatgtgaggagcgcctctgcccggccaccctgtctgggaagtgaggagcacctctgcccggccgccctatctgggaggtgtacccaatagctccgaagagacagcgaccatcgagaacgggccatgatgacgatggcggttttgtcgaaaagaaaagggggaaatgtggggaaaagaaagagagatcagattgttactgtgtctgtgtagaaagaagtagatataggagactccattttgttctgtacttagaaaaattcttctgccttgggatgctgttaatctataaccttacccccaaccctgtgctctctgaaacatgtgctgtgtcaactcagggttaaatggattaagggcagtgcaagatgtgctttgttaaacagatgcttgaaggcagcatgctcgttaagagtcatcaccactccctaatctcaagtacccagggacacaaacactgtgtaggaaaaccagagacctttgttcacatgtttatctgctgaccttctctccactattatcctatgaccctgccacatccccctctccgagaaacacccaagaatgatcaataaacattaaaaaaaaaagtacaagaaaaaaaaaaagaaataataaatgcttatttttgttttaagccaaaaaaaaaaaaaaaaaaaagagggcagttttgctaagatctatcaatctatcaagcaccagcttggaccactgaattaaacaattttggctttaccatgacagcttcccaagtagctgggactgcaagtgcgtgccatcacacctggctaatttttaaaaaacttttgtagaaacagggtctcactatgttatccaggatagttttgagctcctggtctcaagcagtccttccgccttggcctcccaaagtgctgaaattacaggcgtgagccactgatgcacacctttggttacaaaccactacatttttggaaaccctcctggttctggtaggaatttatatttgggctatatggtggtcggtcttttcaagcataatggcacaccaagggttaggtaagctaaatgctttcaagtgcttctcttgcagtctagagttccagcaggatgatttgctttccctccaagctctcttgcaggattcacaacagttctccactaggttggtcctccttaatatccccattaagatttttccccacagacttatcagatttaacttgtctaaaagaaaatctttaattccctgcctactcgctgccaaaaacagaaacaaaaaatcattcttaatcttctgtatcttctgagatctacccatttttttccagccaaaacctaaatatttttcttggtttctgcttttccctcaatcttcacatctaacctatcagctgtttctgtcttataaaatatatctgaaatttgaatattttccttttcatctttactgtcactgtcactagtccaagttactattatattttttaaaattttcactaagaaatttttaaaaatttgttagtgatagtgaaaaaatgtaacatatactgaggtacatacctgttatccagcttcaacaattaactcatggccagtcttgtttcatctattacccctcccattgagatcattttgaagcaaatagagacattattttcatgctgtatttcagtatgtagctctaaaaatcactgcatttaaaaatgttaacccccttcttagaatcattcaatgacttcccattttacactaacaataaaacctacactccttactgcagcttgtaagtccttatgtgtctgacctttgatcctctttctaaccccattttatacctttttctctttactcagtactctgtagccattctggcattttcctgttgtttggccccatcaggatgttttttcagtttggggcctttgcacatgctgttccttcctcctcgcttgctcttccctgactctacatggcagatttcatcttatccttcaccccttggctcaaatgtcacctttacatagggagttttccttaattactatacataactagctccttcccactactctatccccctatttatttcctgcatagtacttactgaattggaaattattttatttgcttattgctcattttctgtttttcactattggaatgatcaggtttatagatctgcccaggcatagtagctcatacctatcatcccaacactttgggaggccagaagtttgagactagcctaggcaatatagctagacccttctctacaaaaaaaaaaaatttttttttaatttgctggatgtggtggcttgtgcctatagtcctagctactagggaggctagggcaagtggatcacttgagcataggaatttgaggttgcagtgagctgtgatcctgccactgcactccagcctggacaacagagctagaccctgtctcaagaaaacaaaaaacaaaacagaatgggtaggaccttctgtcttgtgtccttaatacttaaagcagtatgtggcttataataggtgctcaatagataacatgttgagtaaatacgtgctatctagggggctcaacctgactgtagagaaaggttcatgttgttgagaagattaaataaaagctttttagttagaatgggttatgatataaattaaaatataaatttaatgtcttttgccttccttattacaatgtgccctgtttattttaggctgcctttaatattggttgggaacaaatctgatctggtggaatatagtagtatggagaccatccttcctattatgaaccagtatacagaaatagaaacctgtgtggaggtatgccttgtaatttgatttgaaaatttatttttaatgaattcttactaaattcgggttttaaataggggggacaatgtgggatggaataaatttcctgctatttgtgaagtcacgtaaaccaaataaaacagagaagttggagttggcctctgaactctttctagacattcatgttgtgatgtccacaaagatgcatttttcgttttttttcaaggaatcttttttttgccttatgttgataatttgaaaattgtttttagctctcataattgatttcagagtgtaaaattttattttttcagtgttcagcgaaaaacctgaagaacatatcagagctcttttattacgcacagaaagctgttcttcatcctacagggcccctgtactgcccagaggagaaggaggtaacaggctgtgtttataggggctggaatgtgtatgtagtaactctagtatggtagtgatttttagtaactcttaagtatttgtgtagagattaaactgctgaaatttaaatttattgcttattaaatggttacattttggtactcttcttcaatgacattcacattaaatattcgtaatattttccacatcaatggaatctaatcaagtactgcttcaggaagtgccattaaaacaaacaagaattggcaacaataacaacaaaaaagtcctccaaagacttagctaatggtcttcttgttttgctactataaaatctacaaactgaaaaacacacacaaataaaaacattatgtagttttttgacataggcacaatgtaatacaatgtgactactacttttgtttttgttttttttcttttgagacagaatcttgctctgtcactcaggctggagtgcagtggcacgatctcgatctcggctgactgcaacctccagctccggggttcaagtgattctcatgcctcagcctgccaaagtggctgggatcacaggcatgcgccaccatgcctggctaatttttgtatttttagtagagacagggtttcaccatattgcccaggctgatctcgaactcctgacctcaagtgatccgcctgcctgggcctcccaaagtgccgggattacaggcgtgagccactgcgcccagccccttttgttttatagctaagaaacacagtaactccttattgaaatatccaaaatttaatattttgccatagacattgaaaaactaaatttttttgagatatatctcaagtaccttaaaattcatccttttaaagttgtactattccgtggtttttagtgtattcacaaagttatgcaatcatcaccactgtctaatttcagaacatttcatcaccccaaagagaaaccctgtacctattagcagtcactccctattgtcccgttactcagcccctggccaccaccagtctaccttctgtctctgtggatttgcctcttctggacattttatataaatggactcataccatatgtgaccttttgtttctggcttcttttacttagcgtaatatttccatggtatatccacattgtagcatgtatcagtatttcatttctttttatggcccgataatcattttatggataaaccatgtttttggtgggttttattttttttattttttatttttttttattttttgaggcagagtctcattctgtcacccaggctggagagcagtggtgtgatcacagctcactgcagcctcaagctcctgggctcaagtgatcctcctgccttagcctctcgagtagctaggactgtaggcattcgccaccgtgcccagctgattttttttacttttattttttgtaaagacagggtttcgccatgttgcccaggctggtctcaaactcctgggctcaggcagtcttcccgcctccacctctgcctccaagagtgctgggattacaggtgtgagccaccgcacctggctggatacatcatatttagtttatccccatatctgttgatgcatattgagtagtttctacttttaggctattacgaatagactgttgtaaacattcaatacaagtttttgtttgaacacttgtttgctttttttttgaagacagagtcttgctctgtcacccaggctggggtgcagtgacatgattacagcttattataacctcaaattcctggctcaagcaatcatcccacctaaacctctcaagtagctgggactataggcacataccaccatgcctggctagtttttctttttcttttcttttttctttttcttttgttttttgagacggagtttcgctcttgttgcccaggctggagtgcaatggtgcgatctctgtgcaccacaacctccgcctcccaggttcaagtgattctcctgcctcagccttccaagtagctggaatgataggcatgcgccactacaccctactaattttgtatttttaatagttatggggtttctctatgttggtcaggctggtcttgaacacccaacctcaggtgatcctcctgcctcagcctcccaaagtgctggaattataggcgtgaactactgctcctggcctactctccttttttttgggtcagggccttactctatcgcccaggctagagtgcagtagcacaatcacagctcactgccccctcgacttcctggcttcaacgatcctcccacctcagcctcccaaatagttgggatcacacctgtgtgccaccatacccagctaatttttgtatttttagtagaagatggggtttcaccatgttgcccaggttggtcttaaactcctaggctcaagcaatgcacccgccttggcctcccaaagtgttgggattacaggtgtgaaccgccatgcccggcctcttttttttttttttttttttttaaatttagagacaagatcttactttgtggcccaggctggagcacagtggtgtgatcatagctcactgcggcctcaaactccaaggctcaggccatcctcccacctcagcctcctgagtagttgggactacaggcacatgccaccgtgcccagctaatttttaaattttctagtaaagtcaggatctcactatgttgcccaggctggtctcaaactcctggctcaagcaattctcccatctcaagcctctcagagtgctggcattacaggcatgacccaacactcctggcctgttttaaattcttttgagtacatttagtagttgaattgctgagtcacatggtaattgtatatttgacatacggaggaaccagcagctattttacacaatgactggaccattttacattcccaccagcagtgtatgaaggttccagttcctccacatctttgccacacttgttattttacttttcttttttggtttattatagccatcctagtagatgtggttgggatctcattgttttgatttgcatttccctgatggctaatgatgttgtgtaatttttcatgtgcttattggccatcttctttggagaaacgtctattgcctattcaaagtcctttcccatttttttttttttttttgagacggagtcttgctctgtcgcccaggctggagtccagtggcacaatctcggctcactgcaaacttcacctcctgggttcacaccattctcctgcttcagcctcccgggtagctggaactacaggcgcccaccaccacgcccggctaattttttttgtatttttagtagagacggggtttcactgtgttagccaggatggtcttgatctcctgacctcgtgatccgcccgcctcggccccccaaagtgctgggattacaggcgtgagccactgcgcccggcccccatttttgttttaaagagacagggtctcaccatcatccaggctggagtacagtggcatgatcatggctcactgcagccttaacctcctggattcaagcagtcctcccactcagcctcctaagtagctgggactacaggtgcatgccaccacacacagctaatttttaattttttttgtaaagagggggtctcgctgagttgcccaaggtggtcttgaacttctagcctcaaacagtccttctgccccagcttttcgagtagctgcctttgcccgctttttagttgggttgtctttttttaaattattattaaaggtaatttttattttaagaagcgggggccgggtgcagtggctcatgcctgtaatcccagcactttgggaggctgaggcagggggatcacttgaagccaggagttcgagaccagcgtggccaacgtggcaaaaccctgtctctactaaaaatacaaaagttagctgggcatattggcgcatacctgtaatcccagctactcgggaggctgaggcacgagaatcatttgaatctgggaggtggaggttgcagtgagctgagattgcaccactgcactccagcctgggctacagattgagactctgtctcaaaaaaagaaagaaagaaacaggtccttgctatattgcccaggctggtcttgaactcctggcctcctcctgcctcagcctcctgagtagctgggattacaggtgtgagtcaccacaccaccacacccagcttgaggtgattgctttgattctgtttgtcgggagaggtattgtttttaagaataaaaagttgcagatatctttcaggaaaagtttatagtataagtgagtggttagcaatgactcatggcctaccacctattttcacagtctgtacactaaggaaacattttatatttttatttatttatttatttgagatggagtctcgctctgttgcccacgttggagtgcagtggtgtgatctcagctcactgggttcaggtgattctcctgcctcagcctcccaagtagctgggactacgggcatgtgccaccacatccagctaatttttgtatttttggtagagacggggtttcaccatgttggccaggctggtctcgaactcctgaccttaggtgatctgcctgccttggcctttcaaagtgcagggattacaggtgtgaaccactgtgcctggccatatatttttaaatgattgaaaaaagtcaaataatattttgtgataggtgaaaattatattacattcaaattttatcatttcataaaaataaagtttgattgtaacatagccatggtcattcttttatgttatctgtggctgtttgtgtgctgcaaaggcaaagtttaatagtttcaatagagcttatatgtgctactctcatctcttctcactgctgctgagtgcactactaattgcgctgacacactagacagcatttcaagtactatgtatatcactctaccaggaccttttatttatattcattgcatactcatcatgccaaagcatgaaaagaataataaagtgttttttagatgggaaagcagataaatattccaggttcaaattacagttccagcatcatctttttagaccttgatgcaaatgcaaaggaaatttccatattttgtaatccacttaactatgcaattgagtttccattaaccttcaattggaattgattaatctgcagtgtaatgacatgctaaaaggcaaacatcaagaaaataatcaaatataattttataaataccttgtgctctataaagtcataggtttgtggatatgtaccagtattggcagtatatatttgtgcaaagagacattttcaaagatgggacatgtaaaatctcattacagatcagcattaacatataaacatttgcaattaattttcatggtggacaacactaacttcaaaccccaacaaagcaaaatgttttccttccaaaaagaatttcattcttctcattaataaatctgtattgcaaaactgtactcagttatattttgagttttgtcaaaaaaactttgtagaagtttgatttctttcttactatgtaagtacctacatgacatgcttgattttgcctgttggccccaaagcctaaaatatttgctatgtggtcctttacagaaaatgtgccaactcctggtataaataattaatttgagttatcccttaatctggtgctagtttactcttattcctggtttacttttccttagttaggattcttctttctaatttactccgaatccagtatttcccaaacttacctcatcgtaatagtcactaagtgttacttgttaaaaacatagattctggccgggcaaagtggttcacgcatgtaatcccagcactttgggaggccaaggcgggtggatcatgaggtaggatatcgagaccatcctggctaagatggtgaaaccccgtctctactaaaaatacaaaaaaattagctgggcgtggtggcgggcacctgtagccctagctacttaggaggctgaggcaggagaatggcatgaacccaggagacggagcttgcagtgagccgagatcgtgccactgcactccagcctgggcgacagagcgaggagaccccacctcaagaaaaaaacaaaacaaaaaacaacaaaaaaacacatagattccattctgattcagctaggtgttgtatttatgatacaggaaatttgggaaacagtcttaatactgtgggaactcttacaagaatttacctctgaggccttagcctagcagtatatgaaatcccctctattagtttgttctcagttttttaattgttactttgttctcgggcctgttattagttctgctaatctgttaatccctcatccccacccccatcccacaagagtaaaatatctaccaccatctgttactcagttcttaggtggacctgagtgagaggtaaaattttcaacttttaaactataccttgttttacacaagtgcaaactttaaattgcctataacggaatcttttatttagacaacaacaatatcttttcttttcttttcttttttttttttttttttgagatggagtctctgtctcccagggtggagtgcaatggcacgatctcagctcactgcaacctccgcctcccaggttcacatgattctcctgcctcagcctcccaagtagctgggattacagggatgcaccaccatgcctggctaatttttgtatttttagtagagatggggctagcctggtctcaaactcctggcctcaagtaatttgctcgccttggcttcccgaaagtgtgtgagccaccacgcccagccaaataccataattttttatagctttattaagtagaatttttaatactttttagtagtccttttttggtgttacattttcaggtggttagtttttaaatatgacattgggccaataccttagagctctttagctttgcatttcaagctttaatgaaaagtgcatcgttggccgggcgcaatggatcatgcctgtaatcccagcactttggggggccgaggcaggcagatcatgaggttaggagatcgagaccatcctggctaacatggtgaaaccccgtctctactaaaaatgtgaaaaattagctgggcatggtggcaggtgcctatagacccagctactcgggagactgaggcaggagaatcgcttgaacctgggaggcagaggttgcagtgagccaagatcgcacaactgcactccagcctaggcgacagagcaagattctgtctcaaaaaaaaaaggagaaaagtgcattgtttatttttcttaaaattactttttgaaaatgtatccctttattatgtgaggaaaaatcacttagacaaaataaaagattaggttctgttttgtatattcttgctattgcttcttttggaaacatttaaattattaaacttttttaaaaggagagtaaataaaatataacaatgtagtttttattaatctttaatgactaacaggatcacatttatagaagcattatcttaccattcattattttaaagaataaatcatgtgtgattatagatgttatagtccatttagtactcttttataagggaagccccgtcagatgctttcttttttttgagacggagtctttctttgtctcccagactggagtgcagtgatggaatatcggctcactgcaacctctgcctcccgggttcaagcgattctcctgcctcagcctcccaagtactgggactacaggcacatgccaccacacccagctaacttttgtatttttagtagagacagggtttcgccatgttagccaggctggtctcgaactcttgatctcaggtgatctgcactcctcggcctcccaaagtgctgggattataagtgtgagccaccgcgcccagcctcaaatgctttctaaatgtttgacttctttttctcgtttctttctctttgtatcttaagttttatctttttctcactatatcaaattactctcccagagaccccatttaaaacaagaatagaaggggttaactgtgtatgtttggaagataattattttctttcctattttttaaagaatttcttttctgcatttgagtttgatagcatgatcaaagctgtcatcattaccattttgtaagttaataagtttatatttcctcaccttgacatctcatttctctgatttagatgatctaaataaagatctatctccaagcttagacaaaagtcagagctctccttgaagttttattctcaaaattgttgatagtgattaccctatagtggttatacagtgtagaagcatgtgggccttattttaaaatagtcatatatttattctatccatgatgaatcataaaacaaaaatgaaggaaattgtcagaatatatttccagcagcattagtcataaaagttttagagtcacaaaaggcaaaattctttttaaagtataaataattcttatactaggaagttagtaaaaattttttacacttattaaccagtgataattttgccacttgtttgtgaataagcgtattttatttcccagctttaacatacacacaggggaaagatcaaaacaaatctcattctgctaccagaagtctgatgatcagaaatcagaagttgaggggaaagtccttagtagttttaaaagtcagttcatatcctctatggaatgagggaagatataaataaataaacagttcttctttctgtgactagaaaaatgaatccctcctaaagatgaacttctcttttccctgttcttagaggatttgtggtcttaaggggagagcttgaccattccaaatatcagtcccagcaaatattgcctcatttacttaaaaaggcttgcatataaagtaaatggctttgctttagttcatttttccatgttggttgtatttgatattatgtaaaaataatcagaattattctcagcattgcttatgaaaatcacagtttaaacaattatttcttttctcaatgatttatagatgaaaccagcttgtataaaagcccttactcgtatatttaaaatatctgatcaagataatgatggtactctcaatgatgctgaactcaacttctttcaggtaatggtcctttatttcagacatttgcgtatctttttttttttttttttttttgctgaaagctgtaaaatgtgttagcttaaacaacaagaacagtatgttataaacataagtttctttctcataaaactatctttcacatcaacctatatatgcctaaactctcttatgctcaggaattgaggggattctgatagcttcattttatggtataaagtgggtgtgttaaggatgacttggagtctgaactctgaatcattttgctttcttggttttgaataacatagctacagaaagagccctgtgttttagaaacaggatggagggagttgggaatgtttctttctaagaatgacatgttttactttttttttttttttttttgtttttgagatagagtctcgctctgtcacccaggctgtagtgcaatggcgccatctcggctcactgcaacctccgctgcccgggttcaagcgattctcctgcctcagcctcccaagtagctaggactacaggcatgcgccacaacacccagctaatttttgtatttttagtagagacggggtttcaccatgttggccagggtggactcgatctcctcgtgatccgcctgcctcagcctcccaaagtgctgggattacaggcgtgagccactgcacccagcccatgttttacttaaataatacatttaaaaaagtggtgactattcctaatgtagaatatgtttctttggttgcaattcatggatttaatattgctttgtagattatcattttatattatttgtggttttaacgctggtttgtttttaaatatatttttatgttttttgctagaggatttgtttcaacactccattagctcctcaagctctggaggatgtcaagaatgtagtcagaaaacatataagtgatggtgtggctgacagtgggttgaccctgaaaggtgggtaaatggtatttttcccccttttgaaacttaatattttcaaaatttggcagaaggtgaaggtctttattgcattatttatactttaaggaaatgttaatatttactagtatgcctaaagtctgatttggatatttatgagttgggagggacaggccattgttggggattatcatctttactaccaatataaattagaggtagggaaattggttggatctcaaggatacagaggtccacctgatggaaggagatatctggaacaaaaaaaaagtatcttaaaattcttcctactcataaacagcctttaaatagtcattatttttagggaattttgtctatgagtcaaatttaccagtatagaatgttccctggagaatatattatagaggcacagtgaagttaatgagattgaaaaccagaattttccatgacaaaaataagctcaaagatctgtagaacactactctcatataactttgtgcatgtcagtatattccttgagatgcaatgttggccatttcctctagtgctctctcttgctgagctgggtgtatatgtgaaacaattctgaaatcagctctgtttcattgagatacttgtgaattttgttttgttttgagctttacaatgcaaagctagcatccgtatgttcatgaatctggttcttgccattatgttacatgcttttctcctatgtgactctgtacactttatttactaatttactttatttcaggttttctctttttacacacactttttatccagagagggagacacgaaactacttggactgtgcttcgacgatttggttatgatgatgacctggatttgacacctgaatatttgttccccctgtatgtacctttgttttttttgttgttgttgttgtttaattttttattgagacaggatctcactatgtttcccaggctggtcttgaactcctgagtcaagtgatcctcccaccttggcctcccaaattgctgtgattaaaggcattgagccatgcccagtcacctttggttttgtaatgattttacttgttaaatatttttaaggttgatttagcacacatggggaggtgggcttcaagctaattgggaatattttagaattatagcagagctttatagcaggatttctcaacctcagcactattggcattttggaccagaaaattttttgttgtggatgtcctgtgcagtataggatctttaccacatccgtagatgtcagtgacacttccagttgtgacaaccaaaactgttgagaaattgccgaatgtaccctctgaagtgaaattatccccagttgagaaccactgattccctcatggctcaaacttttcctcttcttgtcgagactacaagtatctttttttgttcattttactgaggaaggaaaaataagatgctagacaacaaacttgttttgggagtcaagagatctcagaaatatgttgattcacatttttcttacattgttcttctccctcagttttatagcctgttcttagcttaagttgaagtaggtattttcctaaacgactggtctatttgtggttctttttctttcttttttttttttttttttcagacggagtctcgctctgtcacccaggctggagtgcagtgtcacgatcttggctcactgcaacctcccaccgcgtttaagcgattcttctgtctcagcttcccaagtagctgggaatacaggcgcccgccaccatgcccggctaattttttgtatatttagtagagaaggggtttcaccgtgttaaccagaatggtctcgatctcctgacctcgtgatccacccgcctcagcctcccaaagtgctgggattacaggcgtgagccactgcacccggccttttttttttttccctaagagacaaggtctcattttggctagctcactgcaacctcaaactccatggctcaagcaatcctcccacctgaccttcccaaatagctgggactataggtgtgcaacacaatgcctggcttttttttctttctttctttgttttctttttctttgtagaaaagcggtctcactatatttcctaggctgatcttgaactcctggcctcaaatgatcttcttgcctcagcctcctaaggtgctgcgattacagacatgagccaccatgactggccagttattttcctttgataatgctgtgtttaagttctgtttgtttaaaaatggacccagtgccatccccaaacaagagaccgccttgttgcaggatccttcttctataccccagggaagcgagcttttcagggatggtgacttcccaggatctggcctcagagttttcaatcattcttcattttttcattggcacattaccttcatagtgctcttttattttagcatagcaccttcagctgtctatgtaatggttcagaaagactgttgctttttacttctccgttattgaggaagcaaagttctttctgattagattcctagtccattaatcagttctaaattgaaacttcctttgactaagttactaaatcttggctcaagttaatttcctagatttttcaataaatatatactaaatgaatgaatttgttataggactctctcataaggttttcttttctgtgtcatttatgtgaatagatgaattctatgggaggttgcttattgctttcttaagtatgacagttaggaaattccacgtcttgtcgcattgtggcttacactaatcacctctttcagttttttttaatcctctttgcctttaattttctgcaaaataactccctggagctactacacgaatatttctatccttatgaaaccctctgcatctatccttcacattactgctagagtagtggataaataaataaaaatttggctctgtcacttcccttcaagacacaggataaaacccaagctgctgcttttttttttttttttttgagacagggtcttgccctgtctgtcattcaggctagaatgcagtggtgtgacatgatcacagctcactgtggcctcggcctcctgggcccaagcaatcatcccacttcagcctgccaagtagctgggactacaggcacatggccaccattcccagataatttttaaattttttgtagagatgaggtctccctttgttgcccaggctggtttctgtctttcaggctcaagaaatcctcccgcgttgacctcctaaagtgctgggattacaagcattagccaccacacctggtctaaaatccaagcttcttaacatggtttgcaaggtcattcatgatctgttctcctcatgcacactccctgccttcattctggaagtcaataccaaactatttgttgtccaccaagcatatgttcttttctacaccaggcttttgtccatgctattttcacctctctccctctcgcccccacctaattaatgcctctcatccttcaagtctcaattcagatgacaatgtttctcagcagtgttgaggttttcccagtccccaggccagagatgttccttttcatgtggctccctagcatccttggcttgcacattcttagctcctgcctcattctgttgaaatgtctttgggggccgggtgtggtggctcacgcctgtaatcccagcactttgggaggctgaggtgggtgaatcacgaggtcaggagttcgagaccagcctggccaacatggcgaaaacccatctctactaaaaatacaaaaaattagccgagtgtagtggcgggcacctgtaatcccagctattcgggaggctgaggcaggagaatcgcttgaacctggaaggtggaggttgcagtgagccgagatcgcaccattgcactccagccctggcgacagagtgagattccatctcaaataaaaaaaaaaagaaatgtctttgtggtccacctcccacttgtttgtggttccttagaagtggggagcctgtctcatttttgtctccctagtacctagctcagtacatttgctttttttttgagatggagtctcactctgtcacccaggctggagtgcagtggcacaatcttggctcgctgcaacctccgtctcctgggttcaatcacttctcctgcctcagcttcccgagtagctgggattacaggtgcgtgccaccacacccagctaattttcttttttcttcttttttcttatttttttatttttttattttttgagatggagtctcgctctgtcgcccaggctggagtgcagtggcgtgatctcgactcactgcatgctccgcctcccaggttcatcgacattctcctacctcagcctcccgagtagctgggactacaggcgtccaccaccacacccagctaatttttttttgtatttttagtagagacggggtttcaccgtgttgtccaggatggtctcaatctcttgacctcgtgatctgcccgcctcggcctcccaaagtactgggattacaggcgtgagccaccgtgcctggccacacccggctaattttcatatttttagtagagacggggttttaccatgttggccaggctggtctcgaactcctgacctcaaatgatccacctgccacagcctcccaaagtgctgggattacaggcgtgagccaccacgcccagccagtacatttggtttttgtttgtttttatgtttgtttgtttgagacagggtctcattctgtcacccaggctagagtgcagtggtgcaaacacggctcactgcatccttaacctcccaggcttaacctgtcctcctgcctcagcctacccagtagctgggactacaagcatgtgccaccatgcctagttaatttgtaaaattttttgtagagatggagttcactttgttgcccaggctggtcttgaactcctgggctcaagtgatcctccttgcctcggtctcccaaagtgctgggattacaggcatgagtcaccatgtccagcactcagtgcatttggttaatgtttattaaacagaatttagggtgggtccaaaaggtcaagtcaggtagaaataacttctctgcatcattttcaactcattacaatattggaattaatatgaagctcataagtatgacttaaaatttgtaggaagaacaaacccatgacaggtaaatcagtattatttgtaaattttttatattaacctgcttttctgatatttaagaaaatgggcctgctacagtggcttatgcctataatcccaacacttactgggaagccaaggtgggtggattgcttgagcccaggagtttgagccagcctgggcaacatggtgagaccccatctctacaaaaatacaaaaattagccaggcatggtagtgtgcgcctgtggtcccagctactcaagaggctgagatgggtagattgattgagcccaggaggtcgagactgcagtgagctgtgatcgtgccactgcactgtagcccgggcagcagagtgagaccctgtctgaatttaaaaaagagaaaaaaagaaaatgttgttactttggaatgagcattattatgactcttctgaagagtgccaaaatcactccagagagtttccttgggaaagtctaaatgataccaagtgaagatattcttgtaaatggtgttacctcacaaaagacttgttgcaattttatattaatttcttaaattttaacatttgattaatgatttattttactcttgaattttttcaacaggctgaaaatacctcctgattgcactactgaattaaatcatcatgcatatttatttctccaaagcacctttgacaagcatgatttggtaagcctttagctgtaattttccattatatatagtaaaacatttttctatggatgatataactctgttccctgagctatgggatgtgtatgttacatagccaaaaactgcttaacctctctaagttaaattcgcaaaaatattttctgctgtttacctttgttgttttctcaagatgaaaatgtctaatttctaatagactctcttataggttttcttacatacatttgaggaattttcttgataaaatgtaaaatttgttgtcatttattaagtagttttaaaaagcatagctttactagattggggggcttttgagttgggaattattatcttagatatctaaacattctgtatccttgtgtttcttcaggatagagactgtgctttgtcacctgatgagcttaaagatttatttaaagttttcccttacataccttgggggccagatgtgaataacacagtttgtaccaatgaaagaggctggataacctaccagggattcctttcccagtggacgtgagtatagagctcacctctttcctctagagttacaaatagtttaaaattatggtgtattacatttgtcactttgtaagcttgtgaggcattatgaaattcttcaatcataattgcctctaagcaagattagctgctgatatctctaagatgaactataaatgttctataaatttatcaggaagggattgttttcttttgaatgatatatagggaaaaagtagtaagtctttgaaaattgaactacattttagcacttttttgtttgattaagggaattggaaatgtcattgctgttgcacaattcttactctttcagaatatggggtgaagcatattttacttgacactgaagattctgtttttttgttattgtttgtttttaatgaactctttttttttttttttttgagatggagtctcactctgttgcccaggctggagtgtagtggcgtgatcttggctcactgcaactctgcctcctgggttcaagccattctcctgcctcagccatgaggttctttcactcagcacattgtggacatttttctgtatcaataagtatacttttatatatcttaatgttaaataatgtgtcacaatatggatgtcctataacttatttaactatcccataattatatatttttatcatttttgggtttttttctactatcactagtattctggtgaggtctgttgtagttcagtcttcaggtatagcctaaggaggttgttttttttggtttgtttttaacttggaaggtagatcgcataaaatatccccactctatctagattttaccagccactcaccgcttatgtttgtaagcttagtgtttctggacagatggagtagagagaggaattacccaccatcttgcattcttctccctttcttctctgcattaagaatggcagtgtagggccaggcagcgtggctcatacctataatcctagcactttgggaggccaaggtggatggatcacttgagctcaggagttcaagaccagcctaagcaacatggcgaaaccctgtctctactaaaaaatttttttaaattaaaaaaaaaattagccaggcttgggggcacatgcctgtagtcccagatacttggggagctgatgcaggaagatcacttgcacccaggggttcaaggctacagtgagccatgtttgtgccattgcactctagcgtggatgacaaagtaaggccctatctttcaaaaaaaaaaaaaagaatggcagtgtaagaaaaactatggttgggctcataggaaattaaagtagtctagacaaaaattatctaggtctggtgcataaagtttttttagctattggcttttttttccccataaatattcgtttaggaacttttcacattttaaactcttttctttcataggctcacgacttatttagatgtacagcggtgcctggaatatttgggctatctaggctattcaatattgactgagcaagagtctcaagcttcagctgttacaggtaagtatctagatactgttcagctcatgattagagatattttttaagactccattttcaaatgtaacaaagagtaagaatacactcatcttcattagtcttccatctacactctattagttttccttgtgatcagatcatttcttttgtgttgaggtgcttgattttattgtttatgaaaagaaagaaagtagagactttgcttcaagtctactccctggggttactccactgatgaaaatgaggaagagctgtgggcattaaaggatttaccagttgatcttgcgttttaattttctttaaacattaaaaataatgcgtattaactgttttctgtattaatacagctttcacaaatcttgtaagccaggcattcttgccaagcaatgtgcaccacttaaagtaaaccatatgtatggaaatagcaagttaaggaactgatcatttcaagagtttcttatatccctgttggtggaaaatctgccatatcttatgggaagccctagcacaagaagacagcctttcttaaattgacagagcaggtaccctttaaaatacttaaccaattagacagtatttaattcaacaccagagaataagaaaacagtcactagccagccatgaggttctttcactcagcacattgtggacatttttctgtatcaataggtatacttttatatatcttaatgttaaataatgtttcacaatatggatgttctataacttatttaactatcccataattatatatttttatcattttcggttttttttctactatcactagtatctctggtgaggtctgttgtagttcagtcttcaggtatagcctaaggaggttgtgtttgtttgtttgtttgtttgtttgtttgagatggagtctctctctatcaccaggctggagtgcagtgatgagatctcaactcactgcaacctccgcctcctgggttcaagcgattcagctgcctcagcctcccaagtagctgggactacaggcatgcaccaccatgcccagctaatttttgtatttttagtagagatggggtttcactgtgttggccaggatggtctcaatctcttgaccttgtgatctgcccctgttggcctcccacagttctgggattacacgcgtgagccactgcacccggctctaagaaggtctctttacctcaggaagggatgcttgctgtccctatgatacagcattgttttctggcatgcctcttttacagtttacatttgaaaggacggctaaccccaaagtgtgtgtccctttccgttttatggatccagctccaagagagtgcagatttgaaatagcatcttttagtttataatatgtgacagtttatcacagaaaaaattagatggaatataatgttggctatattcttagtaattttcattcatttataggatattttccttatgaaaatatactattttatgatgaaataaatgtttggttactcgaaattcacattccagtcaactttcagaaatgcattttttccactaactggggcccttctgcattctgtgtacttcattcacatacagcttgactgttgtacaatatgtttgtttatagatcagctacttcataaaaataataagcagcaatgccctattttgcaaaaggtggaatggaggcttagtgaatctaagtggtacatatttagtggggttttttattattattatttttagtgacaagagataaaaagatagacctgcagaaaaaacaaactcaaagaaatgtgttcagatgtaatgtaattggagtgaaaaactgtgggaaaagtggagttcttcaggctcttcttggaagaaacttaatggtgagagttctcgtaaaatacaattttatccaacaaatttttatagttactagtttacataatgttttcatagccattgacctttttagataattattagaactcaatggcctgtattagtcaagtacagtctaaatgtaacagtaatcctgttgaactgtctttgtttcattgatattagctatcatttgtctttttttaaccagtgtttaaatgggcattaaatgactacagatgtgaaagcacctaacacagtccttggcatgaagtaaatgcacagtaaatattttgaattgaatattgatatctagttcttactactcccttgagtaagaagaagaagacatatttcttttcttcttcttcttcttttttttttttttttttttttttgaggcgaggcattgctctgttgcccaggctggagttcagtgacatgatcatggctcactgcagcctcaaccacctgggcttaggtgatcctcccacctcagcccctggagcagctgggaccacaggcgtgaaccaccaggcccagctaatttttgtatttttagtagagatggggtttcgccatgttgcccaggctggtcttgaactacttggcctcccaaagtgctgggattacaggcatgtgccaccacaccctgccgacatatttctagatgggtattaatctcgatcagaccaaattatggtataatgaagattgccagcaggtggctctagaatatactttcagtaatacggatagtttccttcctttttagctactgcttgtactttatgcagaacaaatacatcttttattttaggtcttaagaactaagaaacataaaatcaatatctcctttgtactgataaatagtacacagtgtagggaagaatgcccttttatttataacacacctgcacatatacacagagatgtttgtatattgttgaaaactagttactgcagatattgagattttcggttctgttttcagaggcagaagaaaattcgtgaagatcataaatcctactatgcgattaacactgtttatgtatatggacaagagaaatacttgttggtaagaaattctgtggcatacaaaaattactaattattgggtacatttttaaatgactctttgaaaacaaattggcttcaattgaatgactctctgtagaacttctgtgtgattttttttttatttaattttttttagagacacggtctcactatgttgccctggcgagctcttgggctcgagggatctcccacttcagcctcccaaggagctgggactgcaggcatgtgccaccatgccaagcttgattttattttttttcatctggtttattcattagaattttaagtcttttggctaggcgtggtggctcacgcctgtaatcccagcactttgggaggccaaggcgggcggatcacctgaggtcgggagtttgagaccagcctgaccaacatggagaaaccccgtctctactaaaaatacaaaattagccgggcatggtggttcatgcctgtaatcccagctactcgggaggctgaggcaagagaatcgcttgaacccaggaggtggaggttgtggtgagccaagataatgcctgcctgggcaacaagagcgaaactccatctccagaaaaaaaaaaaaaaaaagaattttaagtatttttatcatgtgatgattacataggtttagatataaataaaaattcatcatttaaaaaaattaaaaaaaaaattaagttggtacacttaattgtatgttagctataccacaataagaaagttgagaaaaatgggttaggcatggtggctcacgcctgtaatcccaacactttgggaggctgagtcaggtggatcacctgaggtcaggagttcgagaccagcctggccctagtgaaaccctgtctactaaaagtacaaaaattagctgggcgtggtggcacgtgcctgtaatcccaggtacttaggaggctgaggcaggagaatcacttgaacctgggaggcggaggttgtagtgagccaagattgtgccactgcactccagcctgggcaacaaagtgagactccgtctcaaaaaaaaaaaaaagtcgaaaaaactgaactccccttttactttcttctacttctatttttttttttttaaattttactttaagttctgggatacatgtgcaggtttgttgcataggtcaacccatcatctaggttttaagacccgcatgcattaggtatttgtcctaatgctctccctccccttgcccctcaccccctgacaggcccctgtgtgtgatgttcccctccctgtgtccatgtgttctcattgttcaactcccacacttatgagtgagaacatgcagtgtttggttttctgttcctgtgttagtttgctgagaatgacggcttccagtttcatccatgtccctgcaaaggacatgaactcattctttatttatggctgcatacttctatttttttaaaaaaatatttcctgtactattgactagaaattaatatgaaaaccctgctagtgcttggtagtttatctgtaatctgaatcaagtttatttagcagggaagggagtatttaacaaatatgttagccttaaaaatgtataggctactctaggcacactgcctatgggttagccctgctctgcaaggagcaataaaatcaaacaaacaataaaaaaagtacaaaagaagagctgaaaagacactatgaaatacagtagaaggagggttatatgggccaggtgtggtggctcatgcctctaatcccagcactttgggaggccgaggcgggtggatcaccctagcctgaccaacgtggagaaaccctgtcccgggctggtctcaaactcctgggctcaagcgatctgcccacctcagtctcccaaagtgctgggattacaggtgtgagccacagtgcccacccctgaattttactcttgttggagatcattatagcatagatggaatatttaagaaattttataataagcaccgaagagtggcagtgaaacagaacaaaaatgaccttactgtaaagagtcatttgctttttgtttttgattagtggggagaaaaggtgtggtagaaagaaaatagatttgagaatcatatctgagtttaaattttgatttgataacttcttagatgtgtaccatgggcagctgacttaatctttctagcccgtctccttatctgcagaatgtaaacaatgcatgtagagggcctgcccccacacattagtcactcactaatactagcttccatagaatcttttttttttttttttttttttttttttttgagacaaggtttcacttttgtcacccaggctggaatgcagcggcgtgatctcggctcactgtaacctctgctttccaggctcaagcgattctcctgccttagcctccccagtagctgggactacaggcacacgtcactgcacctggctaagcttccacagaatcttaatcaccatttttagtctgcagaatcagaagatacttatttgtctatactttcttttttttttttttttttttttttttttgagactgagtcttgctctgtcgcccaggctggagtgcagtggcgcaatctctgctcactgcgagctccgcctcccgggttcatgccattctcctgcctcagcctccctagtagctgggactacaggcacccgccaccacacctggctaatttgttttgtatttttagtataggcagggtttcactatgttggccatgctggtctcgaactcctgaccttgtgatccgcccacctcggcctcccaaagtgctgggattacaagcgtgagccaccgcgcccagccttgtctatactttctacttttaaaactggcctgaaaagttatgcttaaccagtacttttaaacttaggaagtccagggaaggaagtaataagctatcatgacttaatatatcaatattatgatacttatatttttcattatctttttcttttacaagttgcatgatatctcagaatcggaatttctaactgaagctgaaatcatttgtgatgttgtatgcctggtatatgatgtcagcaatcccaaatcctttgaatactgtgccaggatttttaaggtttgttgctcctacagactatgactgaatgtaacttcatatggactttttatggaattgcagtgtggtgtttcctaaccacaaaaatgcaacaaaatcatgtgtattttaaaaatacatacatctttaccctattcctgaaggttctggttttgttctaaagtggtagagtctcagacatacatatttctgaaagttttcgacatgtgattgtgaggtgcattcctgattgagaacttttacattaatgcaagctcttcccagctgttaaaagttacatatgtctgccttctctctgatgaaaaaaaagagtagtacatatggattatatattgccaaatataccaagaataacagccagaggaaagggataaatctgaagcttagaaagtctatcagtcacttagggattatcaataagattcaataggagtaaaaagctatatgtacaaaggtgtttattctagcattgtttttaacaggaaaaaactggaaataatcaagatggctaacaatggacgatgatttactgaagtaagataaaataatctagtggaatgttaggcaatatttaaattaaaaaataaaaacaataaatgtaaaattaaaaatagttttgaattctgaagaatatggaggacacagtattacatttttaagtggttatgtccagcatgactgcgactatacagacacacataaaaatgcatgtgctcaaggactagaggtgatattaaaaaatgaaagtagtttttataaaagaatttaggtggatttctttatatttcaaaatatgtgtgtttaatgtgtgtttttaattacatgttttttttaattgtaataaatctaaggaatcagtataggtctgttttgtcatcagcattggaaaagtgatctggatcttatttattatatgagatttacctagaccactgccaatctttgccttttggttcactttttcgctttgaaactactgttgctttgcccatctggaggaaatgcttggttcacatttaattaaatagtaatttttgaacttgttatcagattttgatttcattttttattccatagcaacactttatggacagcagaataccttgcttaatcgtagctgcaaagtcagacctgcatgaagttaaacaagaatacagtatttcacctactgatttctgcaggaaacacaaaatgcctccaccacaagccttcacttgcaatactgctgatgcccccagtaaggatatctttgttaaattgacaacaatggccatgtatccgtaagtacttgctgtcttcattttcatgttgcatggttcataacattgcatgccattattagccatgaagggaatatctttgtcacataggaattgttcagcaacagaaagatactttgtaatgagaaggtacaaatttgagtaaatgcaagtttggtttgaatgccataataaaatgatataaacagtgcttctgacaatatctgtatatttttgagcaggctgtaactatcttaatagaatagtacaataaaacacaaccccccacccagcattaaaaaatagttttactggaataaaatgggtttggcatcatgttgttttatgcttataaagcattttcatatgaacagaaagtttatatttttctgtttttgaccttaggtatatgaagttttctaaaatattttattaatttatgttgaaattgtgggtatgcttcagttaggatatgtcttttttaagtgctgtaaagagtagttgtaattggaatttctactgtataaatgttttacattaagtgttacgagccacaaatttcatgtacatttattatatatctatacatgcatatgcacaagcacataactgtggtcatctctgtagtttactaactgccttaaaattgcatggttcttaatggcattcgcctcaagtagtgtgtttgtataaattctgttttgtaacaaaatagtttttcaggcagtgcgtttctcaggactttatagcttattctacttattcttatgttagtctctaaattatttttcttcttatgaaaactacagtgtaacacagagtaataatcaaacattgctataaaccaagaatgacatttttcaaaaaggtgttgatttgtacagatttttaaagtcagttaactttactgctattttattacctaatactttttttagatgcaacaaacccttgaatttctatttgtattcgaagacaagtcattcctattattatagaataaccaaaaccttatttatgttttacctttgctttaaaactctcatgtatgttatctacagagaggatcattacagagacagactctcccgagacatgggccacactgatagaatagagaatttgagaaaaatctgggtctttctaaaaactgctttgtaagttactttttctttatgacttctgtgggattttgttgatattttcttagagaatgaccaaatctcctttcttgccataattaacatttagtaattatgtagaaacgcactgcttggtcaggcttcctgcctagctatatattacgttgtcttccttactacataaatgtacttctttaatcttgtgattacagtaactgcaagtgtgtttttacatctgcatttttaaaacattttactgtaattctgttgtgtgtgtgtgtgttatatgataaatgtacatacatggaccacttgtttatatggttaatcccaaactacttctcatgaagcatctccctgttgctaagcatactttgcatctctcctttttggtgggtggagccttgtgtatgttaaagaatcagatttgatttataaaataacagatggattccagtatgacagctggcagagacttagtagcagtgatttgttcatcatcacaagtcaaaaaaaatgaaaaaaaaatgaaaaaggaatgtcttgggcctatacaagtttttttttttaattcttgtttttcttcatattgggaattaggcattattggaatgctgctaatcgttacaaccatgccaccatgtgctgtggtctcatcagatctcataagctaagccaagtcagattgggccagtcttttgactgagaagcctataaaaaaatgttcaggtgttacaggaagtgatgtcattgattcatcaggtggcgctcttctgagtgggttctgaaccagtacctcttcatgggtggtgtgatggctttgtatgaatgagtggctctgaccactgaacagtcattggagaccccctactttggtagttagagccgaggtgaaatgggttgccccctgtgcctgcaccaactagtgcaactctcctcaaccagaaaggagtcagaaagcctccctaaatttcatatctgatttcaattggatccattgttgattttacatccttacccagagtttcatactgtcatatatagctgctgtgtttgggtagcagatgaaatcaaccctatattttatttgagtagaaatttataaagcaccttgatttagttcctttgagagccagggtgcttgatgaattaaagacgttgttgttcacatcttctcagggttgaatacacttgtcttttgactcatttgtatatttatcattcttctccttcctggttttcaggcatgtgtgtatgctgagggaggaggaggaggagggaatcgttatttaaacgctagcaaactttgtccttttggtgggtgcttatggcttactcaggttttctttttattaatttagacgagggtgccatctattgctgtgcatatttattccacaaaaattcatgtaataataattccatcccccctccaaaaaaagcaaaagtatcagctaattttccctagattttctacagggagggaggaggaagctattactatttattatgtttttggtaaatgtggaattctgcacaactttagcatgccccatactgtccttttcctttctacaaagagtgttgcttatgcctaagtcttttttttttaagttggcacaccctgacttgtgccatatttgtaagtaagaactcaactcctgtccttctgtgtgttttcgcagccatgcccggttacgctgtatgtgcacctgcaacaggtgtacattttgcatctgtcagaacttcctcaactcagacttgctgcaatctgtaaagaacaaaatcttcactgcagttcttaacaggttcttaactttatttactgggtaccaggcattctgttaaaatacaaaagaaaaaagcggataactatttattatacagatactcactacaaagacaagctgactgatgcccaactaacttccactaaaattctcactgtgatgacaatgtttagttttggaagcatccttaataatgtttttaaattaataggtatatttagaggactataaaataagattttggatgtttttttcataaggaagataaattatctttcctattaaaagataatatgtatagggaaattaaaattttttggctgtgagttaatagattaggacttttgtagtaaagaaaagacacattaatcctaaatgaaagatattatactgtactcagcttacaatgaaataatatatctcattaaaaccatagtaatgcaaacagtattttgagtttgaaacaatattctattcttgaaaccatttataattataatctgcttttaagtacctggagtgtttatttgaaagaacatggtttctagacatgaggataataaccaactttaagaactcaaaggaatgtggaaaagagaaaaagatctgtagtactgtttttttaggcctttataattgaaccaaaagcatgaagtaatcctataaagtaacacgcttttaagaaagaaagagaaaaaaaaaggatgcatatattccctcaaagcaataatcttggaaggttgtattcttatgctgatcatgctacctttgttcaaatcagttttacattttttgagcatttaagagctgaatactaatttgtacctgatgtcatatgtgtatgcattaggtttttgaaatcatttaaaagtctttgggagctgggcttgattaagatcaagctaaatattcaattttggttagaaatgggtcagttatttggctcaccattggacactcactgagggctagactttaactgtatcaaatgaccatagtttgtatccaccagcaatatagtggatgtgtctatgaaacagtgagtttatttcttctgtgagtcagaaactgattttgaaggcattctgagagtttcagtgatgtttcgagcactaacagctctggaataagaatgcaaccatctcaggtgactgctttgaagggatcaccgcacccatttggtggcaaagttctgcttctgtgctttagcaccttgtaaagtagtaacatagacagattctctcatgatgactgacagaaaatgcaaggctagttcaaaccaaacaacactcaggtgctccagtgttgggaatcgttgagttggaagagattctagaattcatctggcctaacctcctgttagaatgccttcctgcaagccttcctgagagagtgctgtttatctgctgatggcttgcctcattggaaagcatttttgcttttgcttttattatttttttttaactaaatgttttccctataactttctctctttagttttagttctgccctttagaacaacatacgactatcctactccctcttcaacatagcaatccttcaggcatttgaagacggccatcatgtctcccctaattttctcttctccaggtagaacatccccatttctttcagccttttcttaaattagatggtttagtgaacttatcattcctggttgtcttcatctgaaagccccttaggttttcacagtacctcttaaaaggtgccaccaagaatagaaagcagtgttgcagttgtagtgcgactagtccagaacagtgggcagctgtttttcacaattaggacagcatctgtctagggcatgaattaactttttggcagtcccatcccactgttgacatatattgtcttggggctaattaaagtcagatgtttttcatatgaagagacagatgtcccctcctttctgatgtgtatttgacattttttagttgatgctttaaatctaaatgcagatacatatatatctctattaaatgtcatattcttctttttgatccatttgttctagctcagtcatttcaaacattatttctgtcatttgtcccattatatatttctctaagcattgtgttatttgcagatttggtagatatgtactgtttttcaagttactgataaaaaatgatgttgaatacccagaggttggagagagagagagtgctaaactgagcaagccctatagtattccaccagagaactctttgtcaatgacaggttcaaaattcttggggaaggatttttcagtcaatgaaaaatatgttattatccagcccacattttgtcttcctgtcttatcagatatttcatgaaggatttttctaaaatcagtatataatttcttccatattcctctgatctaccaatatcataattttatctaattagcaagcaacatctatttgatgtcttattttggtgaactcaccttggctccccgtaattgctgatcacaaaccacctattttattacctattctagaaactcttgattgtccataattacagattgattcattgtctgtgtccctggtgacaattttattcctagattggtttagttagctttcaaataaaattgatttagttagctttcaaatgaaataggacagatgtgcattaaatgaatactattgtgcatagtaaattatacaatggccctcaaagagaaatcagtacgtttcggtcatatctatttataaactggtagtaatttaatggtgatgtcagcacacatcctgacatctggtaatcaagaatggaaagaatgaaaacgacaagtagaggaaccagtatacttttcaaacactccttccttatccccgttagtatttcaatcatttatttaagagaagtacagtggaattttaggggctgcgtattggagtttcttctagtttatgaaaggtaagtaagataggtaggtgggggccaaaaactcagtgcccacaggtcccggatggatactgtaaaagaatgaaggtggccaagtataagaaacaaggagaggtggggactgtgacaggcactgtctaaaagaggcagccaccactcagctctggccgtttgttgttgtacaggtctggtgttgccaggttttctggttttacaagagactggaaatcaaggctttggtgtgaaatttccagattgttagagattagcaattaattaacaaatttttaagtactaatcagaacaaagcatgtttatagtccaccagcttgcaacctcagtcttaaggtatggcctagtcatgaaaatagaggccaaggaaaaggacacatagaatgaaaatgtctctggtcccatcaccaccaccaccactttactcctttcccatgaaaaatttgaaaaagttattgggtggtgggatgagaatggaaccacctttccctgttacttctcaggttttggcagctgttactggttggtcactattggtttcctgtgttagacatatcctaatgttaggcacaaaaaagattgattgactaagtaaaagtcatttaaaattttttcactgtattttattcatagggagggttctcacctaacactaggtcctaagtctttgtttttagatatcagaactaccatgcttagtgtttgatttagaattgtgaaagagcagttctaaaaggcttgtcttttttttttttttttttttttttttttttgagatggagtctcaccctgccacccaggcgggagtgcagtggcatgatctcggctcactgcaacctccacctcccaggttcaagtgattctcgtgcctcagcctccggagtagctgggaccacaggcatgtgccactttgcccggctaatttttgtatttttagtttcgccatgtctcaaactggtctcgaactcctgacttcaggtggtctgccagcctcagcctcccaaagtgctgggattacagctgtgagccaccgcacccagctgtcatttttatttaagtaaaaagtttcattgaatgtctacaaagaattaaattagtagacaagtattggtctcaaatcagcacattgttttagtgtgcttgtaaaaattttggtcactgaaatagaaattactaccagatatgatacatgtttgagaccacattctcttattaccccactgtcccctaaccccaccttgatgtgatttattcattcagagtacttaatttaagtacctgctttaaataggaacctgctgtgaactggggcaaaatttgaaaatgaagaatatatggaacctgcctttaagcatctttctaaatattatttctctaagaaaaacattttttaactttggttatattttcagtgatgttagtccttcatgctaaaaaggaaagtgctatataacctgataatgaatttaggcagtttcaagaggttaatttctgcaagtgtttttccttttatgagaaaaaaattgtcttttttcctgaacttatttactaacacgatatattttaagtatagaaagaatgaattaaaaatttttatttccaatttaattgaacgtatattaactttgatgtgtgagagtagtgttaaacatacatctatctcacatgtaatctttctcttggtaattatgagctcactcagatctggataggtttatgttttactttagactaatttatgaataactggaattatttgaatttgaatacatgtggaggatgagtaacatgtggtcagatgattttaatctttgggactgctttcatttcaagtggtataaattacgttactggagaaaaagaccttttgaatatattttaaattttaaatatcttttaaatttgaaaatgattatatatagatgagcttgattgttggtttgaactacccaggatttttatttattaagtatttattactctgacttgagaacactcctgctttgcatgagaatgttactagattgtagtgtatcgtgaactttaatttgtccttttttaggtgtttgttttcatttgtttgtttgtgtaacttagtcattttttgatactctcaatctccttcccagctaggtttttgtgtataatctcaccacttctaacctgttatttaatcaaatattgcttattttacagtttattctttgggcgtgatttcctttgtgcatattttggttttaggatttctttcattctattttattatttgcattagccatataagttgttggttcatgttacttcttaagttcagtagcagcattttattttgacaaccaagtgcatagttcacaccgaatatttacagagacccaaaagtatgatggatagacatcatacctattgcattttttaccctatttataatgtatttttagattaaatatatgtgtgacttttaagccactcattaatgacttcatttacccatattgctttaataatcacccaagttcttcctttatgtagtttgaattcattacttaatataggagccctttattgaagaaaggattttattattgtcagacaaaaatgaactgctttttcataggattgccttatgaaaaggataggtttctaaaaatcttaatgttgttaaatgttggaaatctaagagtctttgggatattacgttatagtaaaatattttgtccaaggaagtcctgctttagtttcttatgaaacttatttattcccttgtatgaaggtccttataagactgtttgtgaatttgtatacatagtcatatatttaaagttatacaagagtttatgttatagattttcattaagtaagctgctgctgcttataatttttaaattttttgtcatttggttaatatattaaaggacatgacaaggtgaagtttgccttatctgatctttaagtatcactagttaacatatagatattggagcatttcctttgtattcatgatcatctgtaaattcagattcttctaatgcttggtgaagcatttcttgacattagtgcacacctgtgtcgtttcccaaagtatgttactatttaggcgtgctcagttaacagcttgcttatggtttgtgttgaagctgctagacactgtgtattgattccttaacctattttatcctattaaatatttatcctaatatatgtttatcctaataaatatcctattaaaatattttatgcctattggctcagttaggagaattgtcctttttaaaattgttattagcagtagtggcattatttttaaaagtagatacagaaaatacagccaggcgccttggctcacgcctgtaatcccagcactttgggaggccgaggagggcagatcacgaggtcaagagattgagaccatcctggccaacatggtgaaaccccatctctactaaaaatacaaaaattagctgggcgtggtggtgcgcacctgtagtcccagctacttgggaggctgaggcaggagaattgcttgaacccgggaggcggaggttgcagtgagccaagattgcaccactgcactccagactggtgacagaccaagactccatctcaaaaaaaaaaaaagaaagaaagaaaatacttcaccagattgaaacatttggagaaacaaaagcagagagtccagaagactttttttaatttttaatattttattttatttatttatttatttattttgagatagaatctcactctgttgcccaggctggagtgcagtggccctatctcagctcatcgcaacccccacctcccaggttcaagtgattctcctgtctcagcctcccaagtagctgggattacaggtatgcaccaccacacctggctaattttttgtatttttagtagagacgggtttcaccatgttggccaggctgatctcgaactcctaacctcatgtgatctggctacctcggcctcccaaagtgctgggattacaggcatgggccaccatgcccgtcctcagaagactttttttttaagtggaatatttgaaaatagaaaagggccaagcgcagtggctcatgcgtctaatcccagcactttgggaggcagaggcaggaggatcacttgagctcaggagttcaggaccagcctgggtcacaaagtgagagcctgtctctacaaaaaatttaaaaaaataaaaaaattttaaaacaagctgggtgtgatggctcacacctgtggtcccagctacataggagactgaggtgagaggtttgcttgagcccaggaggtcaaagctgtagtgagctgtgtttgtgccactgtactgtagcctgggtgacacaatgagatcctgtctgaaaaaaaaaaaaaaaacagagctgggcacagtgtttcacactcataatttgagcacttttggagatcgagacagtaggattctgtaagcccaggagttccagaccagcctgggcaacaaagttgtattaagacccccatctctacaaaaaatcataaattagccaggtatggtagcacgcacttggggtcccagctacatgggaggctgaggcaggaggatcacctgagcccaggaggttgaggctgcagtgagctgtgttcatgccattgcattccagcctgggtgatagagtgagaccctgtctctgaataaataaataaataaagacagaaaaatttactgtagtttggtgacctcagtatagttttcaacttgagatacgtaattacaaatgagaaaaagctaaatatggtatctctgtgccctggtaactttagatacacttctattacagttatattggttgttttagggtattatcttaaaaatctatacctgagatatatatatgggtagagttgtaaaattagaagaccattcacattagtgcatttgtacatctcttagttgtattttggaaagaataaggtggggagatgagaggagtgaaaaataggaaattcaaatacatttctgagaaattgtgtgggaagactgataaaaatgactctctggagctcctctgagtaaaatctctcagttttgcttcttttcagtattttctactgaacttttcttttcctctgcataatagcttacagtctaagacaaggttaattgatatctgggtaacaatttctgaattcttacccttccgctatgttgcccaggctggtcttgaactcctggtcttaagcagccctccaacttcagccccccaaagatctgggattacagtgtgagcctctgtgcccaaccagttcatgtttttatattcaccttaagttgcagaattaattaaaagtattttgtatgcccttgcactaaagatattcagtgcaaaggtacataggaattttggccagtctgcatatgccttgtgtgactgttcacagttcacacagttgttcgtttaactctttattacctgaattttgcaacattttcttctctctgcattattaagtagtggccttaataaaacccaagtccagacgtgttggttggctcctacacctgtgtcaaggagaacttgacgtctgatacattaatgggccttcagcacttctaagccagaaagccaacatcccagacacaggaattttcacctaagaacttgaaagctctaacaaactgcgaatgattagttagggttatattcaacatttagtcattatttctaatgttctaaaaagagatactgcttaactaaatgatcttattccacatagagtaggaaggtttggtgattttgatatatcactaggttagaaaaaaaacctttatacatagacacacgtacacatttttgaccttgtaacatttaattctggaaagtctatcttaatgaaaacatcctaaatatagagaaaaattttatgtagaaagatagtcttttttttgtagccacaaataaatggagatagccaggttgggcatggtggcttatgcctgtaatcccagctctttgggaggctgaggccaggagttcaagactggcctgtgcaacatagcaagaccccatctctacaagaaaaatgaaaattatccaggcatgatggcacacacctgtagtcccagctacttatgtggctaaagcaggaagatcacttgagctcaggagttcgaggctacggtgagctaggattgcaccactgcactatccagcctgggtgacagagcaagacgctgtctctgaaaagtaaaataataaaataaaaggagatagccagcaataggagaatagaatataatccagctatttagaatgtttccataattgatgaagaagtccataccttataacacgtgtgaaaaatatatagaaatatacacacattgtgtttgcagctgtgtaaaaaatacatagaaaaagtctaaaaggggctgggcacagtggctcactcctgtaatcccagcactttgggaggctgaggcagacagatcacttgaggtcaggagtttgagaccagcctggtcaacatggtgaaaccccatctctactaaaaataccaaaaattagctgggcatggtggtgcacgcctgtaatcccagctactcgggagactgaggcacaagagtgactggaagctgggaggtggaggttgcagtgagctgagattgcgagactctgtctcaaaaaaaaaaaaaaaaaagtctaaaaggaaatacctgaccttttaatttgttgccttgggtaacataaatgattttttttcttactttgccttattttctaatgagtgtatattagcttttttatatttgaaaataaagtaaactttagaaagaaaaactatgcagtaagatactataagttattctaagatgatattttctataagtcattttgaaagaattatgcttttgaattgtggaagaattatttctgcttaagtttagaaatgagccagaagcggccaggcgtggtggctcacgcctgtaatctcagcactttcggaagccgaggtgggtggatcacctgagatcaggagatcgagaccatcgtggccaacacggtaaaaccctgtctctactaaaaatacaaaaattagctgggtgtggtggcatgtacctgtagtcccagctacttggaaggctgaggcaggagaatcatttgaacttgggaggcggaggttgcagtttgctgagatcgcatcactgcactccagcctagtgacagagtgagatttcgtctgtctcaaaaaaaaaaaaaaaaagaaagaaagaaatgagccagaagctttatgaaactgtacttgcctctgtttgaaaactgaaaggacaaacatgaattagtttttgatacttttggaatacatgtgagaccacattattctctattcaggttaagcaatgataagcgtgccctccattttaaatgctttctcttttataaatagagcctggtagtgcagcctttaaatgcaggtggtacaggtgtaaaatagttctgtaagtaactttccatgtctaaaagtgtcttaaacagctactgtgacattgatggagccatcgaaatatattttataagttaatagttaccttaagttttaaactagctgtatcttgaacatgtatctatattgatcttgaaatgcaaaagaaaactaagcaataaggtcagtcagaatatattatttcatgtgtcttaaaacacaagggagaccagcctgtagttccagcagttagagaggccaaggtggaaggattgcttgagctcaggagttcaagaccagcctggacaacatagtgagacttcatctctatcaacaaacaaacaaacaagaaaccacatatctgtgaaacagatatctatatttgaagactatctatgagaaatcattttgattgattttaatatgattatagctagcttaaatcctaattcttttttcctcctaagttaaaaaataaatgtaaaaatgtaaaaataagataaaaaatctccatcagtgcagatgcatgataatcacagggaggccaaagatgaagagaaacctctaatgcacctttacctacgctctgactttaaattctatgcatctgcattgacttggagttgtaaacttctgttactctcatcataggtccatggcggtctgtgagtttgggatgttggactcaattttttcacagatatatatttgtagtttttgataacccaaagttataatcatctgtaaacttcacgactaatcgttgttaacctcatttctgttgaatacttatggttactacgtgttgtcaggtactgcttatggtattggtttaaaggacttggtatttcagatgcaccaagaccagcctcatagggatgtttagagaatgtatataacagctttaggtttccttgtctggagtgggtgtgtgtgtgtgtttgttaacagagtacatacagatagattttttttttaagtttggcaatttgctatagaatacatttattttaaatatagaaaacatgagatccatcatatagggtggcaactcaatttatgtgtgggatgcataattgagagatgttattttgagtccctttttttgtgagctctgctgtgaactgcaaactgtgtgcatgtgtataaaaggttaagagcccggatagctgagtggggtgccatgctgttagcagacgatgagggcagtattactcaccaggtgcatgctgtcagctctgtagaagattccatcttcatggagtcatctcatggtccactttttcttgaagccaggtaacatttccaatgggttggcctcgttggagtttttccagcttgaaaaacctaagcattttcttctctgactttttttttaataaaatgctgcctgttggaaaaactaacttgcaagctggaatgaacctgtgatatcactttgctttgtaagaaataattatgtgaggagtgattttttttttttaaatagaaactggtgagggtgagaattggagtgttgtgtcttgctttgttgtgttaagcatggagcactctggcttgtgttgtagacttttgtttctagggatgtacagactattttgtgataactaatctgttctctttgactattactgaggcaaagtagttttgtgcagtttgaattcttggctcttaactcttttgcatatgtcagtgccttggtcttttaatgatatctgacttttgcttcaaatctgtttaacttagttataaaataacctaaactagacagtctctctaagctcttaattttgtaagttttcttttctttctttttttttttttttgcgatagagtctcactctgtcacccaggctggagtgcagtggcaccgtgtcggctcactgcaaactccgtcttctaggttcaagcaattctcctgcctcagcctcccaagtagctgggattacaggcacccaccaccatgcccggccactttttatatttttagtagagacggggtttcaccatgttggccaggccagtctcgaactcctgacctcaggtgatccacccgcctcagcctccgaagtgctgggattacaggcatgagccactgcacccggccaattttttaagttttctacatcatctcaattgtgttcacttagtaactaagacttcagtgacatttaaataaaatgttctgaccttttctttagagctttatcctcttcatggtaagctgtcatacttgagactcttgagggtacttactgagcatgctcacaactcagtttgtggtacaggctgtccctgttcttgtcatgcatactatggcttattttatgtcattgcctttcaatccatcacattacgttatgtctgttagttggtatcattatcactgcctgtctaacaccagggattggtttttttctctttaattagcagtaaccaaattaatgcaaactgataaatcttcccctcccccttcgggttttttggggggttttttgtaaatttttatgaggctcagtgtttccaaagttgactttaatcatttctcttagaaaagtattgtcacttgtcacttaactgcttacaaaatagctttcagttcctggggataggagattgcacattatttaaccatgaatatgatcctcaaaattgtgggaacaccgccttaattttcattttgaacaaccgtaacggtattataaaatgctagattgatttgtctaacttctttatttcctgtgtgaaaaaaagtttacaaatttagatgtctactcccacaaagtagctaattgtctttattagtatctacattgtgtcattttcttaaagtaatgattaagtaattatatatatggctatattgatcaatgtttttgataagcattactgtatgcagttagcttgacaagtgtgctaatacttccctaaaagtagactgctaaataactggtatagggttttcatactaatcatgttttaaataataattatattttctgactgcaggcacgtgacacaagctgacctcaagagctccacgttttggcttcgagcaagttttggtgctactgtttttgcagttttgggctttgctatgtacaaagcattattgaaacagcgatgatataaaaagaaatactgtccctaccaaaaacaaatacttttatgtacattctgaatgctttaagttctgctagaattattgagatatttatacatgcagagttactttattaatatttgtaattcatgcataagagtattttaatgatagttataactgcagtattggctagcatatggaaagaaaacagctaacagccaaactaaaatggctaaattccagaggccaaaagggaatattttgtaaatatatgtacatattcaggcaagatatggtctcccaagctgagttctagaaatgatgtttctagacatttctaagtggtattgttagtgctcacttggctcactcttctaggtttaagttagcccagagattgtatttactcatggatcactttatttatttcacatttactcagaatgatcctttgggttctataaggacataaggtacaatttgccattgtctctccatttttaaaaacatacaagtcagtgtcagcttaccaacatgacattttttcagtcagttgtggtaggccagccttgaagccatcgcacagtctagaaacttgtgtagctgagtgtgcagctcacctttaagggtgaagttaggtaaaagcaattagcagaggcgttatctatgtgattatgttgcttccttgtcagtatgttgaattttatagccctttcaatgaaataaaaaaaaaatttgtatattaccaatgtttttagtttaaataaagagtcacccttactactgttgaatttcatcccaagtgtaaatcattctataatggctgtgtctgttatagtatattacagtaactgcatgtgtcaccaagtgttctatatcaggctaggataacctagaggcagtaattttttaaatgataaaataaatctaatgaatataaactctcatgataaacctattttttccatcatcagccttttcaagtatttaaataaataactgctgtgtactgtga

SEQ ID NO: 40 - DNA, 6040 bp, synthetic construct
  source 1..6040: mol_type = other DNA
agagcgaaaggcttgaggaccaggtcggggccgggttccgggtcggggagcggctccgggcggcagctatgaggcgggacgtgcgcatcctgttactgggcgagggtaggcgccggcccgggggtctcggagctgcggcggccgtgaggcggggtgagggtctcgggggtcggggggcgccgtgaccttggccctcgcgctgaccgcctcgccccgcgcagcccaggtggggaagacgtcgctgatcctgtccctggtgggcgaggagttccccgaggaggtaaggggcacgcccgccgcgggggtgggagcgggcccagccgggggtccctggtgagcgcgcgggtcccttgcaggtccctccccgcgcggaggagatcaccatccccgcggacgtcaccccggagaaggtgcccacccacatcgtggactactcaggtagcggccgtagcctcccgggggcccggcccgcagcggtccggcgggcctgctgggtccgcagtggagtctctttgtccccctagaagccgagcagacggacgaggagctgcgggaggagatccacaaggtacccgtggtgcgcgggacgagggaggggctgggcgcgggctcggcctaatccgcttcgcagcctgggggattggaccgaggtgctccgggtgtccttggccctgataattctgtgacctccgcactgagggttgtcggggcccctacagcgcaccccgctgggagccggcaccgctcagtccagtggtgctccagggataacaggacccttccccgcgggctctccctccctcctgccggggtggcagcagcgtttgctcttcctgtgggctctgtgtgcgccacgtccccgtgctgtgtgctccagcccaccgtcccggcctccgggcacccggagctcccagtaccagagcacgtgtgccggggacatctccaggcaagggcacaggccacagccacccagggcagcccctgctgttggcacccctcactgcggtcctgtcactctgtctgtagcgaggggggaggcaggggccaaggcggcggctgtcttgcagggtgttgggttgcaggtgtggccgtgtctgtcctgagccctctgctccaagggtcttgctgaccacagttatgcttctggggcctggtgtccctgcactggcagtgggcggggaagaggcttctctgagggttcagcagcagctcccagtgtgacactggggagtgcctgctctgccaacaccaggctggaggcaggttttagggaaggctgggctttcccggcctcagagctgcacccatgctacctgtgagcttctggggcctcctggagcctcgagatggcgtggaacggccagggtcgtcggtggtgagccagcagccctgtcacccacacctcatcactgttccctcaggcaaacgtggtgtgtgtggtgtatgacgtctctgaggaggccaccattgagaaggtgagccctcagtgcagaccccaacagcagagacacagtggccggtggtggcccaggtggaccttcacccaacccgtggccagtgccatcgctcacagcattttggggagcctgacgtggagttgcctgacgtggagtcacccggccctctcctgtgatcccacttcccctgagagggtctggggcgtcccgcagtctgagccattgaggccggcagtcctctttcttccccagtttccaaacccccggggggggacccgcagagggcctgcgttgggggcggccctaggcttgggccccagtgacttgggggtgtttgggagccattggggtcagacagatgaggctgcacctgctgcctgccttctcccaccagctttgttcctgtggccgggacttgggccctcagtgggccttgacctcccccttctgctctcccccagccaggctcatgctccagctgggagccatgtgcccgcgggcagcctcacttcacagccaggctttgcttttcagattcgaactaagtggatcccactggtgaatggggggaccacgcaggggcccaggtaatgaggggatgtggaaggggctgggacccctggctcccctgcccctggtgaccatgggccttcaacccagggtgcccatcatcctagtgggcaacaagtcagacctgcggtcggggagctccatggaggccgtgctccccatcatgagccagtttcccgagattgagacctgcgtggaggtgagtaggtcccaggcagggccgcctccttcattccttgtgttctcagtcggtgccctcctcggggcacttccctgaggctgttcccactttcccagtgttcggccaagaacctgaggaacatctcagagctgttctactacgcccagaaggccgtcctgcatcccacagcccccctctatgaccctgaggccaagcaggtgagcatcggctggggccccgcacgctggttccccaggggcccagggggtgctgggtggggcggtgtggcaggtcggcgtgggtcacctgagggtgctgagccaacatccccacagttgaggcccgcgtgcgcccaggcgctgacgcgcatcttcaggctctcagatcaggacctggaccaggcgctcagtgacgaagagctcaacgctttccaggtgtgcccctgccccaccctcggtgcccagcccccttgaacctccgctgccgttagtgactggaacgggtcgtctccgggtggctggctgactcccaacaacgttctctcggaagcagaaatcctgctttgggcaccccctggccccgcaggccctggaggacgtgaagacggtggtgtgcaggaacgtggcgggcggcgtgcgggaggaccggctgaccctggatggtgaggccgggtgcccgcctgtgcctggggagtgtggggagggggctgtgcctggtgctccccctgctttgtctcggtgcaggtttcctcttcctgaacacgctcttcatccagcgcggccggcacgagaccacctggaccatcctgcggcgcttcggctacagcgatgccctggagctgactgcggactatctctcccctctgtgagtgatgccggggcttgaggcctgccctccccgagggtcaggagctgactgccgactatctctcccctccatgagtgacgctggggtttgaggcctgccctccctgagggtcagtgaaggtctcgctcagcaggccatctggggtcgtgcccttgcctggctgtgccctgaacccctcagcatccacagagctctgagtcggggggtgggggggctggccctttgccaaccccgctcgcgtggcttgtttaccctgctggggtcggcagcttggggtgtggcctgtgggcctcagccaggcctcccacgtgctggagccaggtgggcaccctcctcccctatcgcagctgcaaggtcgggggcgtacaggagcctctgggtcctgtagggagggtccggctgcaccgatggggctggcagggtgacagatgggctgagcgtggtgctgcagagtctcctgggagctagacgggctgtggcctccctgcaggatccacgtgccccccggctgcagcacggagctcaaccaccttggctaccagtttgtgcagagagtgtttgagaagcacgaccaggtgagagcatggcgagtcccctgcccctgcccccgccccctccccggcacacacatcaccacatccctccttctgcaggaccgcgacggcgccctctcgcccgtggagctgcaaagccttttcagtgtgttcccagcagcgccctggggccccgagctcccacgcacagtccgcacagaggccggccggttgcccctgcacggatacctctgccagtggacgtaagtgcggcccacaccatgcccgcctgccgcaccaccctccccaccataacactgtgcctgcctcccgcccacccccagcctggtgacctacctggacgtccggagctgccttggacacctaggctacctgggctaccccaccctctgtgagcaggaccaggcccatgccatcacaggtaggcacccaccctccctgggcctgggcccagtatcctggcagctgccctaacccgtgtctatcctcacagtcactcgtgagaagaggctggaccaggagaagggacagacgcagcggagcgtcctcctgtgcaaggtggtaggggcccgtggagtgggcaagtctgccttcctgcaggcctttctcggccgcggcctgggggtaagcaccctagactcccccaccaccccaggggctccaggggcagggcagggcaatctggggggcactgcagccagcgagtgtcaggacttcacctccctcagcaccaggacacgagggagcagcctcccggctacgccatcgacacggtgcaggtcaatggacaggagaagtacttgatcgtgagtgctggggcggcgcggcctgtgcccgagggtggacccggggacacccaggcctgcctggcagatctggcccagcatggccctagggggaccgagccccagggacccttcctaaggccgctgtctgtcccagctctgtgaggtgggcacagatggtctgctggccacatcgctggacgccacctgtgacgttgcctgcttgatgtttgatggcagtgacccaaagtcctttgcacattgtgccagcgtctacaaggtggggccctgcaggggccacgtggccatggggcagggtctgtccctccagctgtgcctcggccaccccaggactgtacctcataccactctctgcccacagcaccattacatggacgggcagaccccctgcctctttgtctcctccaaggccgacctgcccgaaggtgtcgcggtgtctggcccatcaccggccgagttttgccgcaagcaccggctacccgctcccgtgccgttctcctgtgctggcccagccgagcccagcaccaccatcttcacccagctcgccaccatggccgccttcccgtgggtacccagtagcgcagccctggggactagcagtgtctgtcatccgagcagtgggcagcggtggtgtcaggcctggaactggggactagcagtgtctgtcatccgagcagtgggcagcagtggcgtcaggcctggaactggggccagagtggcggggtggagctttgtgtggcagagggaggcagtgcccaggcatgtccctccagggcctggcctccaccggctgtgcctctggtctgggatccccgcctgtggggccctgtgagtccaggacatgggagggtgcccagcagcaagctgggggcatgtgcctgaggtatctgcagatgattcttctctcttgcagacatttggtccacgcagagctgcatccctcttccttctggctccgggggctgctgggggttgtcggggccgccgtggccgcagtcctcagcttctcactctacagggtcctggtgaagagccagtgaggcccctggtacccaagccccctcccctgacctgggtgtgcctcgctgctggggctctgcaggggcagcacagctggggtgcaggccaggctgccactccgggaacgcctttgcgccgggactttttgtttctgaaggcagtcgatctgcagcggggccttatgctgccatgcactgccctggctcctgccggacccccagggtgggccgtggcaggtggctgagcaggagctcccaagtgccggccaccgctgtcagggattgcccacccctgggcatcatgtgtgtggggccggggagcacaggtgtgggagctggtgaccccagacccagaattctcagggctctacccccctttcctggtcctaggtggccagtgggtatgaggagggctggaaggcagagctttgggccaaaagcaggcgttggggggtcccccctcaagtttggagccgtttccgtggttgtagcagaggaccggaggttgggttcctgattaaacttcactgtgtgttttctatctcggatcccagtctctgaagacaacttgctttgattcaaccta

SEQ ID NO: 41 - DNA, 19000 bp, synthetic construct
  source 1..19000: mol_type = other DNA
ctcctgccccaccaccgctgctcctcagcaggcgcctcaccagcctccacaccccttgcgcccgcagaaacgcgcctggccctgagctgtcaccaccgacactctccaggctccggacacgatgcaggccatcaagtgtgtggtggtgggagatgggtaggtacctggctggacttcctcacagcccccaactgggatgccctgagatccttccgccctggtgcccctggggaagcccctggccctgcagaactaggcgtccctggaaggcagcttggaggggacgcttccttctccgagggcccacagggagcacccgggggtgggctgaggggagcttcaccctcttcagccccaccccaccccagaagccatctcggtggagggtgcaggactatgggtgagagtgcccagggctcctcacctgcaccccaaaagctgggggcaggtctcccacggaggcaagcctcagtctttactctgtggatgcaggagggaagtgggaaacctgaaattcagcctttgtccccaggctgacctgggctgtcgtcactggcttggtgccgctgtgtggccttgggcaagtcacagcacctctctgaacctcagcttattcatctgggaggaggcctatgccctggggatgctgtggggtcgcttgagataagctgagtggctgtcttgcttgtagtatgtgccttctagcaccccctccactttctctcccctcccctcagcctaccgggttggggaggatgtgtgggggatgtgggtgaggagcagaagaggcaaggggacattgagagacagagagggaaggaggaggctaaaggatgggagggtgattgtggggtcggcaggggaggggcaggctgggctgagacccttctcagttgtcagatcccagtgacttcaggctgtcttgtcccctgggggcctcagtttcctcatctgtaaaatgacaggtccaggccaggtgcagtggctcatgcctgtagtcctagcattttgagaggccaagatgggaggattgcttgaggccaggagcttgagaccagcctaagcatcatagcgagaacctatgtctataaaaaaatttttttaagccaggagtggtggcatatgcgcctgcagtcccagctactggggaggctgaggtgggagaatcgcctgagcccgggagtttgaggctgcagtgagctataatggtgccactgcagtcagcctgggtgacagagcaagacgctgtctcttaaaaaaacacaaaataaaaggacaggtccaatttgtcaatctgtcatgcctgccagcagccacatcttagggtccagcctacaggctcaccctggagcatgttctagctggaagggggcctcctgtccagccttcccattctacagaggagcagcccaaggctttgagagactcagctctcctggcctgggccctgtggccccgactttggctgtgacccatctaggtgggggcgggcccatttgtccaccagcctcagctgattctgatgcatggctccttatctgccctcgcctgccccagccctgttcacttctgctttgtatctgatcggaggaggggcgggcggaagtcaagggttaacgttccagtcattcaaaattacctcggtggcaggcccaggggagggcgatggtaggaggagaggatgagctgtcttctctgagcaggaagtgacaaaaccacgcagggcaggggaaggcccagagctgtcccttggcctctgggcttcggctgagctacctgcacccgctcccagcctcgcatgctgagggtggaggaggcgcgcgttatcacttccttcctatgtaccagctctggggttaatctagccttctctatttatcctctcaccaaacctaataggtccattttacaggtgggaaaatgaaagttcagggaagctaagtaatttgcccaaagcctcacaggatttgaacccagaccactctgactcaaaccctgacctggtaactgctctgctccacgggggaggtgagagggaagagcagggtcaggtcttccctagcagccatcggctgctgccatgcatcaggccctgtgctcagtgctttgataggcctcgttggatttactcctcagcacactcctatgaggatgggctcatctctattttctagatggagaaactgaggcagaggcaggttaagtgacttgtccaagatcataccactggtaggtggtacagctgggatttgaagcccaggtcaggcgtcgggggcccctcggcattgcctgggtctgctgggcaccctctgtcccacatcactggcccctggagaagcctgtgggaaaagcggattgccagctctgcgcacacctgtggatcagaatctctggggctggaccctgaagtctccactttaacaaacatccacatgacttgcaggctctcgggtgtgagaacacagacagggggcatctcacatggggagacggaggcccagagggctaggctgggtggatgctgaggtctttgcagaggaccaggcagaaacctccccacgtctccggcagagcccatgaccgccgccctcttgcacttcctgtctttcagggccgtgggcaagacctgccttctcatcagctacaccaccaacgcctttcccggagagtacatccccaccgtgtgagttcctggggatatgtggggtggtgggaggaggggagagaccgtcaccaagtcgacccccctttcaggcacttcctgtgggccagaccctgtgtgggcacccacagcctccagcccagtggagctgcctgacagtccagccaagaaggcagcactggcgctgagaggtgctgggggctcccagaacccgggatggggtatggaggaaggggtagaagggaggaggggtggcctttaggctgggcctccaagcaaagggacgtggaggagaaggctggctcaggcaagagcaggagctgggagaggagcttctgcggaagcaggctgctggaggaggtgatccagagagcctgactccaaggaacagggacacctggggacaaggcatgctgaggggtggaacagagctgtctgcaggcctgggaggccctgcgctctattgcaggatgcggaggcagggctgtcatcggacgtggagggagcgtgttggtgtcagactcaggagggaaggatgactggggaggcaccagcccctccctggccagccctcaggggtccccatcactcctaggacatttccccgactccctagcatggcactcaaggctcctgatggccttcactcaacctcccacctggccttattacccattactttgcttcacactctgcctcctccggaccctactgttcgccacaagctccctgcacatttctaccccagggcctttgctcaagctgttctctctccccatagtgctttttctccccacatccacctgtctaaagcctccaggcgcagctccagtgccccctcctccgggaagcctttctgatctaccacgaaggggtctccactccccagagtgactttatctgatctctcccatgactatgagcctgtggagggcagggagccatggccagctctttgtgggtctcccattatctcagcacagtgtcttctacatggtatgacacatgcattaccttacacacaacacatgtgttttgagttgacctgacttggacatcgtgggaaggaccacaggaagatcgatcatagccaccatctagcaaaggcctgccacatgctggcccctgcgcaagatgtcacacatgtgtgatctcatttgatccccctgggagatggctattagcatgcacaggacacccatggggaagctgagcctcacagccactaagaggcttgcctcccaggcttacacggtcctgtccagcttcagagccaaggtccatgcagaacctcgcgggggccctcatttcttgatcttaatgaacccccctttcaggggcagggatcaggctctcctaggaagaggagggcaggcagaagggagaagagagcctggagccgagatgcttccaacccaccccagaggattcctcactacccaacccccaaccccagacttgggtgggctgggctctctctgctgctgtctctccccgggacactctgctcagctgccttagatgccctggcccaggctagaggaaggcaggcagccaggagagggcagggaaaccctagcagagagcctagaaagccgcttttgccccagctcggtcctgatgctggtgagtgcccctctctggtcctgtccttatatacaaaatgggaacaaggattcctgcccactcaccatcaactatcaaacgtttatcaggtgcctctaagtgccaagggagggctggctgcaaacctgagcagggagggagaattaggtgaggcagctcctgctcaaggccatggtcaccagcagtgtgttgtcactgcctctgtccctgggtctctggatgctggcttgagaccttgtcccgcctttgtgcatcttggctgagttgaaggacccacttgctgaaggaccttggaccaatcacttcccctctctgagcctcaatctccttttctataagaggtagaggcttggaagtcccaagctccttccccaggcacctcccttgtacgttgagatggatggctgaggctgctgaggccaggttatggccaggtgctctcagcagcctggaggtccctgatccctggtggcccctagtggactttgttgtcctggacaacatcacagaagctggagaaataggcccgaccagatctaccttcccaagtctctccgaaggattgggtgaaggtatcccagtagggccagctctatgcgtgtggccacctatccaattgcacagggccccatgctcagaagggtcctgcaccttgtttaatactctgatgtctacatcttgaaattcttaatcatttttgagcatgggccctgtacttccattttgcactgggtcttgcaagttctgtggtgaatcctgcctcacaccctcatatggcttcaggcacaaagtttctcagccccagacgagaccccagagcgggatcctgctactgccaatgcctgtgcccctgtgaagggagggtaaaatagtcacactgggcccttgacattggagggggaagagggagagaaggtgggttgggaaaaacaggcagccccaaatctctggcacctgagattaaggtggagagagcttctgggctgaggatggtaggtttgctgggggttggggaggcccctgctgcagatacaagatcagataagcctgagagctggctccccatgctgccagccatgaggggttaacagcaaagggatggacctgaaccttcggaactgacaccttcctgagcagccaatcagttgccaggactcgtggggctgcaccgtgattggctcttgccgcctgctctgttgtatagaccctatattggagccggcagggccctgtgagttctttgcatcaaatcccccgtttcgcagatggggagcctgagtctgctctgtggatggccccgtgctaggtgttggggatacagaaacatggcaggaagacagtgccctcgtgtgcctgtggcatagaggggcgcccccttacacctcacctcgttagaaccaagctcgacggaagccctggtgagcttttaaaactgaaagttaggctgggcgccgtggctcatgcctgtaatcccagcactttgggaggctgaggcaggcagatcgcttgagcccatgagttcgagaccagcctgggcaacatggagcagaaaccccatctctacaaaaaatacaaaaattagccgggcatggtggtgcatgcctgtagtcccagcgactcgggagactgaggtgggaggatcgcttgagcctaggagggtgcggctgcattgagctgtgattgtgctactgcactccagcctgggcaacaaagtgagaccctgtctcaaaaaataaaataaaataaaaagagcctcccaaaaaacaactgaaagttaacctggcctaaatctctcctgtggctcccttcacacttaaaactcatcttaatgcgcaaaccgtgaacaacagcccccgtctccccagcctcatttaccacaccccttacccacttcactccaagtacacagactgccttgatgatctctgcctcccccgaacctcttcactcccctttatgacacccagaaccctccctgcttcctgtcattcagttccctgcttaaacatcgcctccttgaccccctgtctacagcagccccccgtctccaacctgccctctccatcccaccaccctgcttggctgtcttcataggccccccgacagcccgacttcatcttgctgctcctttgctgccactcctcctcttggatggaagctccctgaggacggggcccttatctgcctcactccctgccatcgcgccagtttctagaacagagctgagcccattcctgttgctccgtcatgactgcctccccgaccccggggaggaaggcagggctcagctctgcatggaagaatgtgtgctgctaattgaggttgaatcatttggcacttaattttcactttcatttgaaatcctctcttcggtaaactggcgaatccagcctgggattccagtggacaggatgacatcagcctccctagctgtgtgcgccaggccccaccaggttctgcctggcctctcggcagccccatccctgctcctgccgctgtgtgtgtgggtgcctcatgatgtccagtggctcaagcctctgccttagctcaggcaccccttctgttgggtattctgttccctcctgctccacctctccctgccccgtgacacctccagctgccttcatctttcaaccaatagcacggtaagggcctcccctcctggctgatgtgccagtttccccctctgttcccctctggcccctccctaagacttctccaagagggtccctccctccctccctccttccctccctcccttcctccctcccttcctcccttccttccttccttcctgacggagtctcgctgtgtcaccaggctggagtgcagtggtgcgatctcggctcactgcaacctctgcctcccgggttcaagcgattctgctgcctcagcctcccaagtagctgggactacaggcatgcaccaccacacccagctaagttttgtatttttggtagagacagggtttcaccatgttggccaggatggtctcgatctcttgacctggtgatccacctgcctcagcctcccaaagtgctgggattacaggcgtgagccaccgtgcccagctgggaccttttataaatgcaaatctgatctcatcacctctgcctggcttggccccttgctggttccccattgccctgagaaccaagacctgactggtccgtgcccctatgacatcaatcctttctcacccccaagtcactagccatgcgtgccctgtggtctctgggttccttgaatgcaccatccttcctccgtgggggtgggcttcggtggtggtcaggtgatacctgggtgctggggccccttccacctgccccattcccctcctccactccattctagggccaggcctcagagttctacaggcactagatgaaaacatggtctctgctctctccaactccatttccagccatgaaatagcagcgatgcttaccatgtgggcctttctgaattgggtaacaggatctagccttgctctgccacccactggctgggagatcttgggcaagtcccttcctctctgtaagcctcaatttcttcatccggaaaatggggtgagggttgcccatggtggtctgtgcataaggttcctctctggtcctggctgcctgtgggtctcttaagtaagggggaccctcaggggtgtcacaccattgacacattcctgcacctgtccctctggtcctctggggaggggccctgtggcaggggcatttggggacatggaaaatgagactgcttagcttctcagcatctcccagtggggtggcttgaacatcctctgtttttttggattctcctaatggctccaagaaataggtattttcccctccacattaaagagattgaggctcagagaagttaggtcactcacccagggtcacacagccaggatgtcctggcttcccaaggaactctgtgttcccgcccaacaagaaaggtccttgacctcttcaggcctcagtttcctcatctgtctaatgggggtaacttaagatccttttgtcttggatcacatgagacttcaagacctaacatacaaagaccctcagccccctgcctggcctcagagaaggtggctgttgcttctcaaggtcccagctctttccccatcaccgtggccctgagattccagggatgacccagaggagacaggtgaatcttgtggggcttcttggcactagcactgtggctggacattagaggagagagtgtccaagcatttcccaaaagtgtgtttctggtcaaaactggaaaaacaacacaggtgtggcttttcccatcatgcctcactgtgtctccctggacagcgccttcttcctgaaatcccacagcagtgtaggtggtacccagagtaggtgcacgccagcacctgctgtgcaccagaccgcgggctggccccagggtgcagcggcaaacaaatgaggcttagtgcctgccacctgggatgctgagttccccaaggagtgctggtttaggtggggtggtagccccgacatggctggaagtcaggaaaggcttcttggaggaggtgacattgagcaggggctggagggatgagtaaaagtcagccagcctggcagtggggaggaagagaagggagagaggaaggagagtgggaagtcaggggccactgtttgcaggcactttccagacaggcgggaacagggccgtttgaggaactgagaggtaaccaggaattctgtccagggctggacaggcaaagtgtattaaaaaggctgggctgcccactttttgggggtgtgggggactcctctcaggagaggtgtcttttgtgttactctgaagtgttagcgcttctgcagcctaacattgagtagcgttctctgaggacttcctggaggaggtggtttaattcccttccacctgcattcactgggtgacaggcctgagactgtggagaataagcaggcatcggcctggcccacacagaacccacagcccttgaaggggtggagactcaccaagtgcctgctcgtggtccaggcaaagtagtcacctgagagagggaaccatgggctctttacaggtagaggacgacgaagctccgccagagaggaggacttgtctgggcagggttttgaagcatgaatagaagttgggagtgaaatggggctggaagcgtattccagagggagatacagacaggatcaaaggcttggagggctgggcagcctggagggtgtgggggccagagaccaggttggtgagaacatatggacagctaaggtgggaaggacattctgggcaggggctttgtgtggaccagcacagggaggtgggcagtgtgagcctttcccgggaaacggcttggctggtgtgcgaggggaggagtaggaggagaagtcagaggagccggaggtctcagtggaccaggtcagggcctgtgtgggggaccacagcgggaaaagtgacagtgattccctaaccctcaggggcaggcggtgagggcattcccggaggcacagctgtggcctggggcagtgagcactggtcgtggtcactggtttctggtttcttacctagttgggtcactcactggctgtgtggccttgggcaagtcactgcatctctctgagccaagttttcccttccacagcgtgggtagccagcaccttcctcgcggggatgtgtgtagcaagaactggcttgcaaaacctcccctattccgagcttggagccctgggatggccctcccagcattcgttgggcttccccgtctctgatatttgtcaggcccctcaccccgtgtctggccttccgccagctgtgggggcaggatcaggcatgtactccttggtggccccagcgctggctctgcacccgatgcatagtaggtgcctagcaagtgcatctggaggctcgttcgatggccctgcagggctctctgggtctggcgggagacattgggagtcaaggtcagtgcctcacaccatctcctcggcagcatgtgtctttctaccgtttgccgtggcccttcccatggccagtgactaacagctttcacgcacactctggggtgggctgaaaggccccggaagcagccctctttccctggaagatgggagatgaatgacagcaccctagcttcctgccttctctggggacgccctgagcacggtccgttctgtctcccaggtggccccagcaggactgagagcagcagcagtccacagccatgacaactcaaccacctgccctgtgtcagctgctgtcccctcctttattcctccccactccccttctgcagcatcctggagtcacttcccgaataaacccctcacatcacctccttgtctcagggtttgcttctggggggacccagcctgagacgggatgaacattcattcgacaaaatattgcggctgggcgcagtggctcacgcctgtaatcctagcactttgagaggccgaggcgggcggatcacttaagttcaggggttcgagaccagcctggtcaacatggtgaaaccctgtttctactaaaaatacaaaaattagctgggcgtggtggtgcatgcctgtaatcccagctacttgggaggccgaggcaggagaatcacttgaacccagggggcagagtttgcagtgggccgagatggtgccactgcactccagcctgggcgacagagcgtgattccatttcaaaaaacaaacaaacaaacaaaaaacaacaaaaagcaaacattgagtggcagcatagggagagaggtaagtttattctcatcaagactgggaggaaaagttacacagcctcaattacctttccaaaggacaggtacgggtaggaaaaggattaagagacaatctttttttcttcttgttaacttgtattacatttttaaaaaatataatgaatcagtaatgaaacaaataaagaaacccaattgcaaatgctgtgtgactttgggccagtcgcagactgtctctaggtctcagcctccgaggaatgacatggagctggaccacaattcccaggttctggggtttgagattgaccttacctccgccttgcctgctccccacaggtttgacaactattcagccaatgtgatggtggacagcaagccagtgaacctggggctgtgggacactgctgggcaggaggactacgaccgtctccggccgctctcctatccacagacggtgtgctgctcccacctgccttgcagtcctgacctttgctgtctctgttccctctgcttgggatgcccttccagccagctcagcctgggaaaccctacctctccccttaaggcccagctcagggagtctgcctgccttgcatgtcccaggcagagaagggcttcctcttgcactccctcagccctgcattggttcccggtcctcaatgtgcccatcttcccaccccattgcctcctgggctctggcaccccctgtttccagtggtggggcaggtggattctgcacagggccccaggaggcagcccagcatggtgagccctgggagtgctgggggaggggagaggtggaggatgcctgcaggtggctgctgggtcctcgcccttcctccagggtatgcagggaggcggctaaggccggtaatcagatggtggatagtatatggattggagtatggactctagaatcccagatcctcccctcaccagagtgcacgttggcaaactctttaacctctggaagcctcactttccctgtctgaggaatggggctaccagcagtgcttgctgcagagtgacatgtgaggataaccacttcgcagaggccctggcctttagtgagcgtcctaacaaacagcagcctcgtggtagaggcgagaagggtatctctgctctgcccagatcctaagtccccagcattccctggggtgttccaccctcagggagccccaagctccacctctcggtggctgccatggtgggacacctctgggccctcctcactagcaacctcgcttgctctgtccccaggacgtcttcctcatctgcttctccctcgtcagcccagcctcttatgagaacgtccgcgccaaggtgagctggacagggtgggccttgggggctctggggcaggtaaccctgagggacagagggaggaactggtgactctaggctggtccctggggcagcagaggtcgcatacagagagggtccccagtgccaaccagggctggcagagggacttgagggggtaagattcagaggacctggggtggggggtgctgcgatagttagctatacccccactttccatggctgcattctcctcctccccacacaacctcatgtccgcctccgattgtcacataacctcatgtttgcttcttatgtctgcacaaaacctcgcctcctcctttcctacaatcatgcgccccctccttcctgcacaacgtcgtggcctcccctccctgtgccacctcacgtctctctctcctcaccgtcgtgcccacctctgatcttctggcaacttgctgcctctcctctccctacaccctcacactccctctgatccccgcacagcctcgcgccccctcttgacccatacaaccttgtgtccccccacccacctgcccagtggttcccagaagtgcggcaccactgccccagcacacccatcatcctggtgggcaccaagctggacctgcgggacgacaaggacaccatcgagaaactgaaggagaagaagctggctcccatcacctacccgcagggcctggcactggccaaggagattggtatgggcctcgggctcagaggggcgatctggctgcaggggaggccctgacttggcctcgtggtgtgattgtaaacacgggctgcagggccaggctgtgcagtttgaactcagctgtgctgtgcacttgctgtgtgaccttgggcgagtcacgtagcctctctctgcctgtgtttccttatcagaaaagcatgggatagtgatagctcctgcctcctggggtggttgggggaattcagtaacttattccaggtggagctgccagggcagcacctgtgtgtgagaagcactctgtgttagtagtagtcgtcctagtagtatgagtagtatctattaatagatactgaaaataaggaggtgtgctttgagcagacagaagcagagattgagtgggggtgctgtggttgcttggaggacaagtggcaagtcaaacttgggtgttctgggaaggcttcctggaggaggtggcgctgcattagatctaaagggtgacacatttccttccaccaccttctctcctccctttccccactccctttggtttctcagctcgacccctctttgcctccaaatcactgggctggagaaatatagtaacttctcaaggtcacccagctagtaggtggcccagccagatttgaaggaaggacagcaaattattggctcactgctggggggtgcttctttgtagtggctcagggctgcctgcatcagggaggcgatgaccatgggtctggcttcatgcatggtacccaggcctgctggctgttcctgtccctgtccctggtaggtcccaatgtgtctgtagctcagggatccttgcccaaaagcccaaaaccaccagctgggtttggtcatatgagctgtgccctctgcctcaccacaggactctgcaggcccagggtttggcccccaaattgaatccactagacctcctcccgccccaccgccccagccccgccccacctccccctgccggaactgggagggccctggggactcacatctcttcacaggaagagaaaccgcagccaccacctccctccttctgtgactagcgtggtgacacagccatcttccccgggggcctcagactatggctcacaccctggctcccttcccctgtcctagggccacagctccccagcctgcaagtctttccttttaaatatcaaggattcatccctgccttctctttctgaccaaccagcacccctccaacccctgcccctggactccttctattcagggtgcagctctccagcctgtggcctggctgtcactgacctctcccttgtaaagcacatgctttgggatcatgtggagggtgctggaggcctggattctggtcctggctctgatactgattggctgtgtgaccttgggttagtggctgcccctctctgggcctcagtctccctctccacataagctgacctggacaatccccaaaggccctctctcctccataaggtggtgactcagagttcttgccttggcctctagccagtctttcctggctgaccctgcatggagctggggcaggggcagtgattttaactgtgcctcagaccagcttaggcctagggggagtcctggggggactggcagggatagtgagggaagcagcaactgcctctgcccacctggactccccagccctgggatgacaagttttgggggcagccctgagcccagctgataatcacagctgatgtggactgagcacttcctgggagccacttcattctcacagcagctatgacgaagagctcttgtcaccttcactttacagagaggaaacaggctcggggggacatgttgctggcttaaggccacccagccaggattctgacaggggtggactggctccctaagccacaaagctgagggccatctgtcctccctgcacctccactgcccccaccgccccctcaccctccttgccctctctgtagctcccctgccccctgcctcagcttgatgagccatcgcatggcaatgagtcctagacagatgggagactgaggcccggagagggggaactgactaaagtcctagagcagtgagaggccgagccaaagtgagccctggccccccagctcaggacccttgtcctgggtgagtgggtggctgggtgccagggaaaaggcagttggtggatgtgggggaagtggacgcagatgtggtcccttataaggagacagtggccaagtgcccagtgacacctcctcaacacagggggctgtggtgaccagactccgggctgagctcagggcaccctgctcttgccagccaagccccatgacaaccactgcccatgatccctggtgggcgtatatgcctccaggtagaggggagacgcccagcatgtgactcagagcgagtgacatcctctctgagcctcaggctcctcgtccctgccccacccttcctttctccccagcacctggcctcagtgggctcccctgttccaggggctgcccctcctgccatcccgacttctccccccagctctgtgccttcgggccttggcttccccactctgggcctgtttcctggtctgtgaaatgggaactcaccccggtgttgttggaagcacccagctcagtgcctggcacagggtaggtggtgaccagcgtccatccccttccatcctgccacagagaagcaagcgggctttggcggagggcccagagttcccctcccctcccttctccttcctcttggttctgacatcggcccccaggcctgcatagcatctcggcagaaggggttttgtggtttttcacttcagggaaactgtgcagcttgaaatggacatgggaagtcacacggactctttgcagaatgtcatggaacgccgtccctgggggtgggaactaggcctgcctttctcctcatctgtgccccgggctctagccctgaggggtcttcatgtgggagaaggctgggcctcccatggcaggacagaggagctctccaatgccactcctcccagaaggcccccagctgggcccaggttgagggaatacatccagcgtgtgagtttggatgagtcgcatactctccaggagcctcagtttccttgtctgtaagacagggacggtgctaaggaaggggctgatgatgttgggaagttcctggggagggggccctgagggcttcaggcctcctggggattatttgcaaccctgggagaatcctggagggatgggcaagacaattttctagaaggtgaggctcccagagatttggtcactgatgcttgagccctttccttcacagaaaagcatcaaaattcccgccctccttccacggactaagggctatgtgtccaagaaagacacagacctgccctggaggccttagtctctcactgagttcacgctcgctattacagacatgaggaaactgaggcacggtgacgttaaactccttgctcctggtgacacagcctccaggtgaccccactgggactggatggcggcccccagagcctggtgttcagttgtatggcttgggagggggtgtacggcatggaggggtgtatggcgtgggagggggtgtatggggtgggaggggttgtatggcataggaggggtgtatggcgtgggaggggtgtatggtgtgggaggcgtgggaggggtatatggcgtgggaggcatgggaaggggtgtatggcgtgggagggggtgtatggcgtgggaggggtgtatggcatgggaggcgtgggagggatgtatggcgtgggagggggtgtatggcgtgggagggcttgtatggcatgggaggcatgggaggagtgtatggtgtgggaggggtgtatggcgtgggaggggtgtatggcgtgggagggtgtatggcgtgggaggggtatatggcgtgggaggggtgtatggcgtgggaggggtgtatggcgtgggaggcgtgggaggggtgtatggcatgggagggtgtatggcgtgggaggggtgtatggcgtgggaggagtgtatggcgtgggaggggtgtatggcgtgggagggagggtgtatggcgtgggaggggtgtatggcgtgggagggtgtatggcgtgggaggggtatatggcgtgggaggggtgtatggcgtgggaggggtgtatggcgtgggaggcgtgggaggggtgtatggcatgggagggtgtatggcgtgggaggggtgtatggcgtgggaggagtgtatggcgtgggaggggtgtatggcgtgggagggagggtgtatggcgtgggaggggtgtatggcgtgggaggggtgtatggcacgggagggtgtatggcgtgggaggggtgtatggcgtgggaggggtgtatggcgtggaaggggttgtatggcataggagacatgttggcccagaaccccccccgccacttaggccttggctctcctgtccatctccccaaccagactcggtgaaatacctggagtgctcagctctcacccagagaggcctgaaaaccgtgttcgacgaggccatccgggccgtgctgtgccctcagcccacgcggcagcagaagcgcgcctgcagcctcctctaggggtaagagtcccccactctagtgcccaactcccatacacagcaggccctggctgagcagtggcctttggttcactgtgagtggcatttaggccaggacagaaagaaggtgggtatggaggttgcctcagtttccgcagcctacttgtcatctgcctgggccagtctcactctctggagctcatcttccagaggcaaggcccaaggtatgaatgaatgcctggtaaccccccacccccgggccagggagtgggtgtcacggagccccactctgcccattcctgcaggaggtgatggaaaagatgccttggtccctggccctaggagagcccagtcgagccagggagatcctgcacccacatatgtgggtggaggtgggagagcctgagctatgatccccagggggcagatggtggggtcagtgagttggaggcagcccacaaggcctcctggaggtgtgggaccagaaggacagagaggactggtgaggtggggagagcagcattggcagtcctggtgggagtcaaaccttgagcaaagacctggaggtgggaatgagctgtgagccaggaaggcgagagctgtggattctgcatgtccccaaattctctttccctgcttatcttccttccaggttgcaccccagcgctcccacctagatgggtctgatcctccaggatccccacccaaagcctgatggcaccccggctggccatgctgtcccctccctgtggcgtttcttagcagatggctgcagagcttcgttgatggtcttttctgtactggaggcctcctgaggccaggaacgtgcaaatttgcaggtgctgcatcccaagcccctcatgctcctgccttcctgagggccagaggggagccccaggacccattaagccacccccgtgttcctgccgtcagtgccaactgccgcatgtggaagcatctacccgttcactccagtcccaccccacgcctgactcccctctggaaactgcaggccagatggttgctgccacaacttgtgtaccttcagggatggggctcttactccctcctgaggccagctgctctaatatcgatggtcctgcttgccagagagttcctctacccagcaaaaatgagtgtctcagaagtgtgctcctctggcctcagttctcctcttttggaacaacataaaacaaatttaattttctacgcctctggggatatctgctcagccaatggaaaatctgggttcaaccagcccctgccatttcttaagactttctgctgcactcacaggatcctgagctgcacttacctgtgagagtcttcaaacttttaaaccttgccagtcaggacttttgctattgcaaatagaaaacccaactcaacctgcttaagcagaaaataaatttattgattcaa

SEQ ID NO: 42 - DNA, 13771 bp, synthetic construct
  source 1..13771: mol_type = other DNA
aaaggcgccgggactgagcgaagggcgtttgggtactgccgtcgccgccgcccaggccggggaggggtgcgttagtgtcaggaagcgggctgcgccgaggtcgtagcggaaccagctggcgaccccgcagaatgaaccacaagagcaagaagcgcatccgcgaggccaagcggagtgcgcggccggagctcaaggactcgctggattggacccggcacaactactacgagagcttctcgctgagcccggcggccgtggcggtgagcgggtcgggcgggggtggccaggccgggcatcggcacctccagccgctacgcacctttctctgggcccgaggctgccctcgccccgagcgcccgggacctcgtagaggctcacccgcaccccgcggagtttggggtccccgaggcgcggattccggggcgggtctgcttcctcccgtgctgtggccgcccgtctgctctggcggacgacgggagtcccacgcctgtggcgctctcaactagaaggcccgtcgtccctgactcctttgggcggcgggtcccctaggggacctggctgtcaaggctcatggggggtggctctaggaacgacgtggcctcacgcacgcgccctgcccccaccccggaggagccagacgagagtcaacttccttcggtttgtcattaccagttggccttggggacacccttatctgccactggactttttttttttttttaactggacaggtcttttttaattccctcaggataacgtggaaagggcagatgctttacagctgtctgtggaagaatttgtggagcggtatgaaagaccttacaagcccgtggttttgttgaatgcgcaagagggctggtctgcgcaggagaaatggactctggagcgcctaaaaaggaaatatcggaaccagaagttcaagtgtggtgaggataacgatggctactcagtgaagatgaagatgaaatactacatcgagtacatggagagcactcgagatgatagtcccctttacatctttgacagcagctatggtgaacaccctaaaagaaggaaacttttggaagactacaaggtgccaaagtttttcactgatgaccttttccagtatgctggggagaagcgcaggcccccttacaggtaaagtattctgcagctaagtggttaaaatccttttcttttttttttttttttttttttgagacagagcgtcactcttgtagcccaggctgcagtgccgtggtgcgatctcggctcacagcaacctccatctcccgagttcaagcgcttctcctgcctcagcctcctgtaactgggattacaggcatgcgccaccacacccagctaattttgtatttttagtagagacggggtttcaccatgttggtcaggctggtctcgaactcccgacttcaggtgatctgcccgcctcggcctcccaaagtgctgcgattgcaggtgtgagccaccgcgcccggcctgtggttaaaatcttatctacaacagcatttgctcgctgagttcagttgctaatcttttttggaaacagtgagtactccctcggctgtacattgaactcatttagggggctcctgaggcctgcctgggccctactggggagactgatttaattcgggtgatgcctgcgcatcagaatttctgaaagctcttcaggtgacttgaatgtgcagctatggttgaagcactgatctctaagggaggttttaataaagtccagcaataaaccacattagtgatttttctttttttttcttttttttttcttcattgagatggagtctccctctgtcgtccaagctggagtgcagtggcgcaatctcagctcactgcagcctccgcctcccgggttcaagcaatcctcctgtctcagcctcctgagtagctgggattacaggtgcccaccaccacacccggctaatttttgtattttcagtagagatggggtttcaccgtattggtcaggctggtcttgaactcctgacctcaggtgatgcacccacctctgcctcccaaagtgctgggattacaggcgtgagctaccgccccagctgatttttcttattttgttaggaatcagtccatgaacaatgcacccagtgtttctgtgtaccagaatttatataatctctgaaataaagatgacatatcacataaaattaaaacctggccaggtgcggtggctcaagcctgttattccagcactttgggaggccgaggcaggtgatcacttgaggccaggagttcgagaccagcctaggcaacatggtgaaaccctgtctctactaaaaatacaaaaattagccaggcgtggtggtgtgcgtcggtaatcccagctactcaggaggctaaggcaggagaatcacatgaacctggggaagcagaggttactgtcagccaagatcacgccactgcattccagcctgggtgatagagcaagactctcaaagaaaaactaaaaacttattgttttgtgtggtatgtgtgtaagtaaattacacttcacatcttggatatctccattctgtaggtggtttgtgatggggccaccacgctccggaactgggattcacatcgaccctctgggaaccagtgcctggaatgccttagttcagggccacaagcgctggtgcctgtttcctaccagcactcccagggaactcatcaaagtgacccgagacgaaggagggaaccagcaagacgaagctattacctggtttaatgttatttatccccggacacagcttccaacctggccacctgaattcaaacccctggaaatcttacaaaaaccaggagagactgtctttgtaccaggtatagatgaactggaagaaagtacattctttgccgggcgcggtggttcatgcctgtaatcccagcactttgggaggctgaggcgggcagatcacgaggtcaggagatcgagaccatccttgctaacacggtgaaaccccgtctctactaaaaatacaaaaaaattagccgggcgtggtggtgggcgcctatagtcccagccactcgggaggctgaggcaggagaatcacgtgaacccaggtggcgaaggttgcagtgagtctagatcgtgccactgcactccagccagggtgacagagtaagactccatctcaaaaaaaaaaaaaagaaagtacattctttgatttcaatattttgtcattttggagcagaactgttagagagtgagtccaaaaaatcctttggatgctgcctggtaaatgaactggtactcacctctgacagtaacatgtagctatagtgtcacatactttgggagctcttgttcacattttatatggctataaaacctgataaactgtatgcaggcccggtgcggtggctcacacctgtaatatcagcactttgggaggccgaagtgggtggatcacttgaggtcgggagttcaagatcagcctggccaacatggtgaaaccctgtctctactaataatacaaaaattaatcaggcgtggtggcgggcgcctgtaatcccagctactcaggaggctgaggcaggagaatcacttgaatccggaagaggaggctgcagtgagctgagattgtgtcactgcactccagcctgggtgacagagcaaaactccatttcaaaaaaaaaaaaaaattgtatgtaaagatacaacttttctttgtttgtgtatgtgtagcggcttgtttgtgtttctgtaaattggggtttaattcttttttttttttttttttttttttgagaccaagtctcgctctgtcacccaggctggagcacaatggcacaatctcagcccactacaacctcctcctcccaggttcaagcgattctcttgtctcagcctcccaagtagctgggaatacaggcacatgccgccacacccagctaattttttgtattttagtagagacggggtttcatcatgttgcccaggctggtcttgaactcttgagctcaggcaacccacccgtctcagcctcccaaagtgctaggattacaggcgtgagccaccacccccggccagggtttaattctgtaaattgaattggaggtctcactgttacccaggctggcctccttggttcaaacaagcctcctgcctcagcctcccaaagtgctgggattgcaggtgtgaaccaccaagcgcagcctaaattgggtttttgatgcagtatagcactgtccgtgttgagtcaggaaatcccacaccagacaactgcgctttgataagtgaaggaaagtaaggtaagtgtatttaaagtaggtgtcctcttcgtagaggctgaagaactttatgcttttgcacttttggtcatagctttggattaacaggagtaaacaaactttttctataaagggccggggagtcaatattttaggtaagccagactgtcacaactgctcaactctggccttgtagctggaaagcagccctagacaatccgtcaccaggtgggcatggctgtgctccgataaaacttgatttacacaaacaagttgtttgcaatccctggatcagaaggaactaccctgtatcatgtctctgtaggctctcccttatgggtaggagttcccaatttctggtgtgtgtgttatacagtaattaggtataggatcaaaccttgtttaactgtttatttgttggatttcaggaggctggtggcatgttgtcctcaatctcgacactactatcgccatcacccaaaattttgccagcagcaccaacttccctgtggtatggcacaagacggtaagagggagaccaaagttatcaaggaaatggtataggtgagagtcatttttttcttatttctgcttggtttcaatttcgaccccagagataaaatggctagtccactgctgcgatgatgtgtgctgatcgtacacaggcctgggcaaagctggggctgccgaccctctgggtagaggagagaggggccaaggtcagggcaagtcctcagggtgttcgccagcctcgaggtggcagggtgagactctgcatgttgaatccaagccactcagtcaagacgtcataattgggattgtttctcgttttgttttgtgttttgtttttcaaagctagcgctagctaaaatcattttatttgggttttatttgggttgtttctttttcttacctagaagcattattcccatttgaacttaataccttcagttcttgtgagtgaggtgactgccctggagacttagctcctctgtttatccacagaacagatacagcacgggcagcggcagtgcaagccacccacagccaccccgtgccactgtgtcccaaccctgacctggagggaccagctctcggggtaagagagggattctggcttgttccatgctcagcctccctgctgagagggccagtaagggtggtggcttctgttctccctggactcttgggcatctgaggcccacttaccccgccccgtaggccactgcgtgctgtgatttggtcacaccgcaggccttatgatacaacaggtcttttgtcactggatacagtggatgccagataaggtttctgaaggggagggctgctgctcttcagttcagttttacgctcccagtgaggggggaccatctctgttatttgacacctcgtatttcttacaaatctaattgtttctactcttagaaatagaatctaaccaatgcaactctgatcattatgtgctgtgctgtggaaaggaaagatttttttaaaaatcaactgggaagggttcaggaagtaaaactaggaagagaaactttttgtcctaagggaataaaactaagactaacttaaggaaaattgtgcctcgtgtattggtggcacggctggctcatttatgcaggtggtagtaaattgtgtgtagttagtataattttccttgcagaaaaacatgggcaccgtattgggtttctcttgttcccagcctggggttttgtcctcaccattgtacagtatccattctgaacggacacacctggcattcccaggtgtttctgagagacacaggcctcgactctgagtgagtctttgtgagtgggtatggctgtcagtgcactgagaacaacacttcttgcctctcaggattttgaagcaagagcaccccgagttggcagtcctcgcagactcggttgaccttcaggagtccacagggatagcttccgacagctccagcgactcttccagctcctccagctccagttcgtcagactccgactcagaggtgaggccttgctctctggctgactcctggagcctccaaggctcatgtaactcagtcataaccaggtgtgactcttcctcctcctatccaggagaaggatatgaaagtttttccacgttgttctaagggttacacagttgtcaccattcctgctgagtggtgtatcttgcccattttacagctttgcacatgtgcatgaatttttgtttgtttggagactgagtttcgctcttgttgcccaggctggagtgcaatggcgcgatctcggctcactgtaacctctgcctcccaagttcaagcgattctcctgcctcagcctccctggtagctgggattacaggcgcatgccaccacacccagctaattttttgtatttttagtagagactataaactctgtatacttcagtagggcttcactgtgttgaccaggctggtctcgaactcctgacttcaggtgatccacccgcctcagcctcccaaagtgctgggattacaggcatgagccacagcgcccggctaagaattgttaaaatagcctcgaggtatcaggggtatttggggatttagtgaagtaaatggctcaagatgaagcagcagtgtcagatttcaaactcatccttctgacctcaaagctcatatgaagaatttcccccatggatggtgaattgtaagcctggaaattcagcaaatccagtaaccttaaacttgaagctgacagtaatactgggtgagagggccctgcacctttaacagatgaaatttctatctcagcctggcgcagtggctcacgcctgttaacccaacactttgggaggctaaagtgggtagattacttgaggtcaggagttcaagaccagcctggccaacatgatgaaatcccatgtctactaaaaacacaaaaattagttgggtgtggtggtgcacacctgtaatcccagctactcaggaggctgaggtgggagaatcacttgaacccaggaggcgaaggctacggtgagccaagatcataccactgcactccagcctgggcgacagagtaagactttgtctcaaaaaaaaaaaaattctgtcttttcacacagtctactgattgagtcttttctcgtcaggcggggaacaggctctgggaatgttcagtgctatacctacttctttcatatatcaagctctgttggtagagtgaaatcttataatgtactttcagaattctgactaaaagatttttacaatgggtatcctattcagacagataaccacacggttaagagaacagtggagggatacttggcctctgagggaagtttgaaattcttagggagccaggaacatccaaggaggtggctatgaaggctacattgtggagctgtcataatgactgctttgcatttgggagaaagtgaccaatatctgtgctgtctcccgaggtcagaggtttgtttaatgaagaagtgggttgcatccaggttgactccttgttttctgtcctcctgtgtccagtgcgagtctggatccgagggcgatgggacagtgcaccgcaggaagaagaggaggacgtgcagcatggtgggaaacggggacaccacctcccaggacgactgtgtcagcaaagagcgcagctcctccaggtgacccagcaaggctgttgtctgtatggaaggacacgctcgcggcaagggcagggcctggggagggtggcctgtccagtcctgcagacaaggggaggcctgacagagcccaagaatgaggacaccctcggcacgggaacccattcacttagcgtttgctccagtagctttccctctgctaccaatgcagataaacgcggcttgttttactcaggcaagagaatgtgaatagtgccaagaaaatcctttacattatttaataaaaattgaatccattttctatcttggaaatgttttcctttgagaataccagaacattcccttattgctcttctcctcatggtggtcttgggggaaagcagtgactcctgctgtgcatccttgaccacagagtcgtcgtcccagcagcgtagggagagccattggaaaagtcacccggcatcttctgcagaacctgaggcgtggcctcttgctttttctcccagtttgccgttgctgcttgagtgctcagccaaatcagacagcagcagaaaactctgatttgtcaaatctttttttttttttttttttttgagacagggtctcgctcttgcccatgctggagtgcagtggcgtgatcatggctcacagcagcctcaaccttccaaactcaagcaatcctcctgcctcagcctcccaagtagctgggactacagattcaccccaccatgcccagcttattttttttttattatttttttttgagacagagtctcgctctgttgtccaggctggagtgcagtgatgcgatctcggcttattgtaacctctacctcccaggttcaagcaattttcctgcctcagcctcccgagtagctgggattacaggcatgcgccaccacgcccagctaatttttttttatttttagtagagacagggtttcaccatattggccaggcttgtctcaaacttctgaccttgtgatccgcccaccttggcctcccaaagtgctggtattacagatgtgagccaccatgcccggccagctaattttttttattatttttagtagtgacaaagtctctctgtgttgcccaggctggtcttgaactcctcacctcaagtgatccccccacctcagcctcccaaagcagcaggattattacaacaagcatgagccacctcacccagcttttataaaaacttaatcacgtctccaagtacaagattggacctaaataagttaaaatttaaacgtgtttgcaagcacctgggcatgtaacaggctcataatggaatttgttcactctgcatttgtctagggtctttaaatgccacaggtctttgatgtgctggttgaagtgttaagagaggttgttggaagatagtaaaatactgaagttgaagctaggcatcgtagctcaagcctgtaatcccagcactttgggaggccaaggcaggaggatcacttgagctcagcagttcaagaccagcttggagaatatagtgataccctgtctttaaaatatatatatacatgttttaatactgacgttcatagggttttgaatgtctgaagcccttgactgctgaaggtgacattcctgttaacgttttctctcccagcagctcagtctttcttaaatgcatgggggaagtgcaggacccgcagccctcctatcgcgtggcctccattctctgtggtttagctgaaattccatggggaaattcaagtgacttactcaagtgaatttatcaaactggaatgtgcatttctcaaccctcgatgtcctttcacagccatacttagactcttcctgcctttttaaattgtttctattattacatatttatagatttatatctgcacttgatctgtgactttgtaatttgtaagaaaactctggagaaagccctgccatgacttccacgtggggtcccgggggtcctgcttttaacattgccttccagctttgtacccagcatgctgtctacgtgctgattacaggcagttgtgctttccttggcaggattagggacacttgtggaggccgggctcacccctgagcagataaagagactctccctgaggtgctttcagcgtaagcttttggcagccacccaactcagttctcgcatcttctgctcctaccttctcctctgtcttctttgaatttggatattccttccctggtccaagctcctatcttcggtcaaatgctgtttttactgcttcctaaggatagattatcaagaaatttaacagctcggccagctcagtgaaacactgaagctaatgggatgttgggtaagaaggttctgtgctgtctcattgaaaaccgagccagtcaaccacaaggctggcagggtgtgatccttgtaacgtcttgtgtctgttacctcacggatgtcggtaaggagtttccacagagccagctgtgtaccacagagactgagagtggtgagtggactttgtgagccaattatgtgtcggaaggacttggagtctgcccttcttcctgtatgtcatcatcagcccacaaatgcattcagtggcagtgacccagcaccatcaccatcacccactgctcagtctgtcttaggattccttatctttttctccatcatcatagagactgaaatttcaggggtgtttttgtacagtgtatttttttgtgggggggtgatacattggggttttttgtttgcatagagtgggaacggtgtgcaatgtgctcttaccacagaacttaaagtatgaataggctccattcttccgcaccatgggatccataagaagtgctcactttgcgaggtactctgagattagcgttccccatttgtttgacctacagacgttaagtgggtgacttgtgttacacacggggagtaaattcagagatggcacctgtagtctttgcagtctgttgatacttctaaataactaactggatgactttttggggattgaccagcagatgccatctcttgccctcttgattcacctgcttgccttaatttgtccctaaattcaactaaacttcaataagaggggttgtcaaggccatggggcgcacttggaagcactgcctgggctggagcgttggaggcattggcaggcaggtgggaaggagctctcactgcagtgttcacaggcagggaggctgtgtgtggatgtgttagaattgtgtgctgttgcctctcaaaatatccactagaaacaggtgtaaccaggaaaatacaggtctctgctcactgttattaacagactgtcatttcctgacattgggtcatgtggctttactctaggaggctggttctctatttttgtcttagttcaattttctgcatcctcaaatgccaaccccagtatgtggctgggtaggtagaactgtgctgcctgcctgccatgggggctgctctccctccttacccccacgcccacagcccccttggttctgtggtgggcacaggatgtgtttgggtgtgagtaaagtcaaactctgaatgtataatctcttggtagtaatatctgagtggtgttgctactcctgctttttaaaaagacttttcttgccatctataaaaagcttttttctttttcccagcattgctcctgtgctgccacgcttgccctttttccttaccttcctttcagttttctatcaacaactcctctaaacttcagtttaaaataaaaaacagcccaaaaaggctctttgccaccagggggcgtggtaggacacgttgccagtggtctggataggggagcagaaattttgaattttaaaaattagccaccaaggccaggtgcagtggctcacacctgtaatcccagcactttgggaagctgaggcagggggattgcttgagtccaggagttcaagaccagtctgggcaacatagtgagatcccatctctcaaaaaaataataatctagaaaataaagattagccacccagttttctttctccagatgctaaagttgattcctgtttgataacagtattccagaaatgaggggaataacatatctgataggcccaagtcagctctggatagtacagtgtctggatagtacagattctgtgctcctgggacatgctttgtttattcctgccaggccagggattcagcagccctattccccaacccccgttactgtctctgtgggctagccaggctgtccgttatgtaagcacaacaggggcaaggtggggaaaccgtgtgtggaaaaggagtggagtggtggcgggtggccaaggtagactaggaagagtgggtacccagagaccacttgttcagaagttaactcctcttcccatctggcgtgagctactccattgaatggtgccaacaacagtaaagtgaaggagataatgttagattattttcagggatgattctccaagatgacagcagatcttaaaaccaaagagctgggtcctggaagaagggatcttggattattaacttctgatggaaggaccagagtgggagagagaagagttggggacctagaacatcaggaggaccctgggtctttggggatgaggcttcaccatcagctggaagaatccatgcttcacacacatgcctctgccattagtggtactgggatgtttagggtgacatccttgaggggagagccactgaaaagagggacattcacattttgctgtattcttgcagctgtccgtgtcttaataattcaagcgttcaataggtgtttgagggccaggcactgctcttgaggtgctggagataacggtgacaagcccaggtccctgacaagctccacaagcttaatggacagtgaatgtgcggctgttgcggctgttcacagggccgctggtgagggcaggtagaagaaagtgcagaccttcttaaatgcaggtgtaacggatctacatgaaagagcataattaacaccaatgtatacttaaggtagtaacagcttcttcataaagtagcaaaactaaggatctgtgggaaggttgctggtgcaaatgctttataagcttactagagactgagccttggatttaggactttagacgagtataggatggaacaaaatttttgcagtaaatgtaaaaaatgctgtgtaggaggaaggcgtataaggatgccccagctgtaggttctttagattgtctgtagtatttccacgagtaagttgtttttgatgtgtgtactggtattgctggtagatttgaagtggagtctggcggcttcttccacactcccctcccactagcttgtgtcaagatgtgacatcctatgcagcaaaactaggtgagcttgcacccccaggcggtggctctcaactttgtctcattgttcagaaatttcggccaggcgccgtagctcacccctgtaatcccagcactttgggaggccatggcaggtggatcacttgaggtcaggagttcaagaccagcctggccaacacggtgaaaccccgtctctactaaaaatacaaaaattagccaggtgtggtggcacatgcctgtagtcccagctacttggtcaactcaggcaggagaatcacttgaacccaggaggcagaggttgcagtgagctgagatcaagccactccagcctgggtgacagaccgagactctgtctttaaaaaaaaagaaatgtcatctaagccccagtgaacctcctgggaggagagctagccctggccagctgtctccaaagtgactggatgctacagaagaactgggactgtcttctgcacactcgtgcctcctggagttgtcagaacactgagcagtctcctagttctgcgtccgtctagccatggggtctgccatgaaagcctgtggatctgctattgggttggtattttaaactttcacttgggtgaaacttgttcatcattttaaataaagcaacatgatttgga

SEQ ID NO: 43 - DNA, 132684 bp, synthetic construct
  source 1..132684: mol_type = other DNA
gttactcagccgagcggccgaggccggacgacgcggcttggattgcggagccgcgagcagcgctgggtaacggccgcggcgaccaccccggacggcccctgtccccgctggcgggcttccctgtcgccgttcgctgcgctgccgggtgagtgcggcggacgccgcagggccgggacggcaggcggccccgtcgtgtttatgttattgtgccgctgccgccgccgccgccttctcctcagccgtaaccccctcctgggagtgggggcgggagcgcgcggtgggcgggggcggcgcgggaacaatagcggcgcggaggcgggggccagccgagggggcgtggggctgcgggacctgggtgcgctccgctgcccgccagcccgcctgccgccgcgagccccgcccgcctgtcctctcgcgtcctcttcgcgtgggtcctgcctccgcggcgggagaagaaaatggagcgggggggtgggtggcaagttctgaaacacttcggcaagggtcggacggaggtgtctttgcggcccgccgcgccctggctgcctccggggcggcggggagccggggagagcgcttctgccggcaggtccccaagcctgccccgcgcccatagggaccgtattttgcttctcgatgctttctttgtgctaacgttctgggcgaacgcaggcagcagcgctgaaaagggccagagtggcctgcagctctgggctgcagggcagagagcccaggcccgtggctcgggtgggaggtgtccatccagcttggcccgagcttcggtggtcagcgcgcatttctcttgagggtcatcggtggtgaccttttgactttttcaccccaccctcccatctctttgtctcgcatttgtgttcccgattcagagatggtagaaccaagtccattttaaagtaccctgatgaacactttccgtttttatttctgaaagttccctgcttggtctttactgcgaatttaataacatgttgactacatggcattgtccagtgattactatttttacctctgaaatccagcgatctttccagtagaattctggtccgtcagtccattgtgttttgagataagcatccagcaagtacctccttggcaattagaacatctgttttttcattcattcattcattcagcagctgtttagtaccgtactcagatgaagaggtttggtgtgaaggtaaagtatcctttcatggaagaggatgctttgactgaagtataatagatggacctttaaatgagacagttacataagtgatgtctgttaaggaaggtatggttatattctgggtcattttttaagcagtatatctggaagttcaagtgtaataggaagtagaattagatttggtctaaatatacaacagcttttatttatttctaaattttattttttccagtcttgcagccttacagtcatttgtaatggttacctcagattcccctgctgtggttaacgttaaacctaggaggtcagatgctctaagtgaacatgtttagtgctgtgcctgacaaaagcaagcaatcaaaatgggacttccttgagggcaggcctgtcttgcatctgtttctccaccacctagcctggaatatagtaagtgttcaataaaagtcggattgatgaaaagctctttgtaattgataatatttaaaatcaagccttaaaaaaaaccgtaatgttctccataaagttttggaagcttcatgcaactgtcgcatcagatggctaaatggtcagttcatgtacattatctgttatgatgacatgggcttttgaatcacgtgtaggtcattcactgtcctaaaataaaatcttgtctaaatatttttttaatatgataaataaagtaggttgtggagtgtgtgtttctgtgtatgtgctagtttatgtgtgtccgtgtgtgtgcatgtacgtaatccacacacaggcactcataaactggtatttcagtaggggtctaaaatgattgcatttataattttgtgaatattatttgaaagttttttggtgactcttattgtggaaaattgaggacaaaaccacataaatgttttattagaaatatttctaatattttagaaatgtttacttgaaatgtttggttttaagttctaacttgtattaacacaattggtacaaaatatgagcctaaaactcaaaataattgatttatcgaagttaaagctcttttccacttactaaatacagtttagcgtttgttttgtatttgaaagaatatgaaatgagttaactaatgagtttcttattatttgctgtaaagtggaaatgaagaaataagaaaataatacttttttaagatgatggttgaaaatctttgagataccaaagttttattgctttacctagttagggtatgtcagattctagtaggggttactgacaatcctttggcagtagctcacaggctgtgtaaagaaccagagttgtgttactttgttttccaaattgttggtttttaaaaatagctttattgcaatttaattgacataaaattcaccagttagagtgtatatatttcggtttttagtattttcacagtgttgtgccttgatcaccatcactaattccagaacattgtcatcaccccaagaagaaacaccatatccattagcagtcactctgaatttcacttcaaattatcctttaaagtaagagatatagcatcgattctgttagtaaatatattcctttagtaagtatgaaaagggctccttttaaatgtcctgtcctggcagaataggaaactatatccttcatactcctttagatcctgggggaaatgccatttggaaaggaagtcagtgcaagaataaattgtatacaaattaatgtggttataatcttaactatttgctccatgcctgatattatcaaagtgaccttgtgaggatgagatgttcagtgaaacaacttgaaggaatttgttgttaaatgactagtccccaactatcctagtgctaagaggttgttgaataggagcctgcttcttgttggtctgctttgccagcgggttgaattttgacatatttcagtcatctacatggttgagatgctttgttgcacgagtggaaatacaaaataatgtctgacattaggattccagtgctctagaggtctctggtcaagtcaatggtatgggtagtagcttttctgattcatgtggtccaaggaagtcattataaccacatagctttatatatgaatcatttgcctatgtcagtgaactgtgatgctgattgtcttaatcatgagctctttacctgaacatttagaagccttgcattcttactcttaatgcaggttaagttgaactttgatttcagaagtgagttgactgaaaggtaacaggagtattgaaatgagttatcctgtcattcaggtcaataggtggagctagagcaatccaggaatcagacctaggttcatttctcagttctgccatctggactttgtcatcaaattctggagctttaggcaagtgccttaatgtttttggctttaaaagtataaactgaggctgtcagaacttttttttatagaaggcttgttcctcagataggtggttcttgagaaaacatactaggacaaaaagagcccttcttgggtgataatcagaagcctaagttaagaacagtagtcaaagttaggattttgtaattttgtaattttcagaagccaaaaaaattgttgagttgaattttttctttaatatccagacttagaaaacaaatggaaggcttcaccataagctagagattcttggaaaggtaggcttttatttattccacagcatcatgccttctaatgagaccgtatgctcccagagactttgtggaagacataaaatgagttcattatcctcaggaagcttataatcaaggattagactgaaggcatcgctaaacagttaatttatgctcttttaaaaggtatatgaaagggttcccgccaaacaaaagcccacttcacatctctgtgcaggccaaatttcactgaaatccagtttttaaaattgtgtgtgtgtgtgtgtgtgtgtgtatgtgtgtatacgtatgtgcatggagagagacagagaggagacccctttttggaaaacttagtagcttccattctttttcttggaggtgggttatatcacaaatacaagagatacctgtgtttcctgttaccctttattatatttcagatttagttaaaatctgccattctttagaaagtcaaggaactcaaaccttacaatgattgctagcgtgggttttaaggtcagccctgagttctaatcgtgctccaatctaactgtggtataggctagttcaggttatataacatatttgggcctgttttattatctgtcaaatgagaataataatagcacgtaacctcatagggctgtgaggtttaaattaggtactgcatgtaaagtgcctggcactgttgtggtggctggaatgctagatacaagtattcaggtagtttttgctattgttatcacttatatttaactttgaacaaacataaaatgccaagtaaacgtcaaaccagtttaatgcacagtgtccattctaattctccagaatatgccatttgtttcactctgcatctctggggggtttatttaaaattcgatcatctcatgtaatctgaattgactgagatgatttatattaacatttggaccagtaatcctctctatcttaaaatttggaaatgttccagaagcaaatattgaagggaacatatttgccactttcacgattttttgccttttcccacaggagaaaattgcctaagctttcctaggtttgttatagacatctaaaggaatgagaatttaggagctacgaatagctttatcatgtgacacatttgaagaaaatggaatgctgtcacatcttttaaatttagtgttattgggatcttcgattctgtgaagattgcagatttgtcagagacctggtaaccacaacaattcattgaggcctggaggcctcttaaaaaatgagggagattatttattagtaccacttagaaatattatcttttctgtattttctgtggttttctaagtcttctgtttagcgtttctatgattataatggtggattaaatttcttgttccttctcaagagcatctactatgagatgacactggtttttacttcggcagtatttactgagcattgcactatactaatccaggtattcggtgatgtaggaaccaaaggaaatagaagtcagtttctaccctcagtgagctgagtataatttgatagaagataaggattaacgtaagcacatttatgtcctaacacaaggaagcaaatattgttagtcatttcattaggaatttcttttgtcattggggcatttggggccttccaaaccttacatctcttgccatgcctttgtactcactcgataaacctgagaaagcaagatatcttcttttctgattcctggtttaagttgagagtgtggtgcacattagtcaaaatccaaatcataagaaaaggcaaaccttatgaattcattttggaatacaacagggtatcaaaataagtatatgagaaatatgaaaagctgacagtagaaaagatgctactcaggtactaaccagagttctcaatctcctctgtattgaagctcttatgatgtaaggctggatctgtactagaaacactttttaaagtctctctccagtattgagaagtatagtcctccagtactgcctcttggtgctgagagactcaagcctgccacccaccatatttctggggaaactagaaacgaaaaatagccacacacaagcacttgctttgcttggcaggaaacatcaaaaccataagatgttatttcctaaaagtcattaattgggtagaaaaatcaccattttctgacttgttccaggaaggatggctttctgattttcagatgccattgggtcaaccaaaggtaagataaagaaaagctactgctgtgtggatttttctgtgacttgagaaagcgtcacttttcagttaaacaaaaaccaaagcatctagctttggctgttactattgagaatttaaaagtcttaatgttttaatttgtttacattttatattttgactaagtagtaatgaattcactttgactcaaaattccaaagatttaaaaagataaagaatctccttttctactctgtgtagccacctagttcttctgcctggaaactgttaaaattcctgtgaatacttccaaagatagtttatatatgtttaagtatataatcctttgttcaaaatccttggtccagatgtattttagaatgaaggctttttttgcagttgtggaaagataatgtagcacatctaccgtgttatccaaaatccctagtaagaggttgtagcctcatgattaaacacattaacatttctgtaaaaaatacagacataggccaggcgcggtggctcacgcctgtaatctgagcactttgggaggccgaggcgggcggatcacctgaggtcaggagtttgagaccagcttggccaacatagtgataccccgtctatactaaaaatacaaaaattagctgggcgtggtagcgtacgcctgtaatcccagctacttgggaggttgaggcaggagaatctcttgaatctaggaggcggaggttgcagtgagctgagatcgtgccactacactccagcctgggcggcagaggtgtagactctgtctcaaaaaacaacaacaacaacaacacccagaaataatcaaagacattaatatttttataaaagcataacaaatacaagtagggtgaataaagattataaaatcttatgctacgtctcgtcaggttttaccaccaaatacgtttgtactaaacttattttaaaaacgtatttttcacagctttatggattttggctttgccaatgaaggataggtgtcatacatatatacagtactgtatagcctctgctctgctccctccctttttatttaatgtaagttgttgcatgcaatatgtatcaccttttgcttttttgttttttgcttgttggtttgttttttgagacggagtctcactcttgttgcccaggctggagtgcagtggcacaatctcagctcactgccacctctgcctccgaggttcaggtgattctcctgcctcagcctcctgagtagctgggattacaggtgatccacctgccttggcctccaaagtgctgggattacgggtgtgagccaccgcacgtggcctgctttttgttttaatatagctgagagattattttatatcagtcatatcagtatgtaaatggcatgcttttttaacatctttgtggtattccatttgtcttactctgtttgggctgctatatcaaaataccataacttgagtggtttaaacaacagaaatttatttctcacagttctggaggtcgggaagttcaagattaggctacttagtcaatttggttccctggtgagggtccttttcctggctttataggtggccggcttctggatgtatcctcacatggcccctaagagctctagtctgttcctcatcctatcatgggggctccaccctcatgacctaatatagtcatgagaggcttagttaactcctaaaggtctctcctccagatactatcaagttagagggtaggccttcaacatatgaatttggagggacacagacagtccataacatcattatactggtataccatttaactcctttctgatgcatatttaggtagttttcagacttttgctatcaaaagccatggtgcagtggattaccttgtgcatacgtcgtgttgcacttaaatgcataggataaatttccagaggtagagttcctaggccagcgtatgtgcatttgtaattttatgtattgctgaagtgtagcctgtagaggttgtccaacttccattccaccagcactgtgtaaggatgcctgcttcttattacccttagacgtctttcatcttttaagggctgtttgtgttttctttcttttgaactgtccttgtctttgcatgtttttctattgctttgttgctcattttcctagatttgtaggattaattttacaaattggctccatgctattttttggaaatgtttttccccaatttgctgttttccattctatggtaggctattatgtatggttccaactttattttcttcaccagatatccatccatttgtccctacaccatttattaaataatccatctttgtcttaactgatttaaaatgccacctttaccatttacaaaatttccacgtgtatttggtaccattgtttccattgacccatctgcctgtttgggacctgagccatcctgtttttattattgtagtttatgctgtgttttctgctaggtctaattcccttttatttctcttccttttcagaagtttttttctggcttctatcttgtttattttatatgaacttctaaaaacaacccatctagtctagtctgtacccctcctctgccagtctttctgttggaatcactttttttattttattgtggtaaaattatgcacagctagatgcacaagcattacagtccaataagtttgcctttgtatacacttgtgcaatcccagatcaaaatacagaacacttccatcacccagaaccttttcttacatccttttcaagttaccttgctccccagtgattggcttctattaaatggattcagtgtactgttaggatttctttgtatttatagaataagtgacagctttatgatgtacctttatatccaagaataggaaaaacaaccttttcatttgttgaagtctcattttgagttcctgatagcatttttaaacattaaaatttttttttgctgttttatatatttaagtttttttttttttgctggaaatggcatctttttttccacttttatcttctatctggttatatataagaaagctttttattttgtatattagttaatatttcatatattaaataataagccccctgtagaatatttattatttctaatagttttgtagttgaattttttatttttcttatgtcatgccagcttttttgtttcctttgatttttacctcctccctcccccaactttttatactcttatattttttcttattgcatttatagtggtgattttagaagattatagttttcctccattatatgtaaaatgagccaaaatatctgtttatctgttgagtatttaaatgttatgaataataatgaaattagggagggattatgggaatacttaaagtagtgtgaagttttctctctaaagttaatgtaacttgaaatgaattgtggttttcaaaatgttaaatggacaagttggggatcacttgatagtgaatgtaggattagcagttaactgccttgtgtcttatttgatgatacagtcatgcaccacatggtgaggtttcggtccattacagaccacatatgtgacagtggtcccataaaattataccatatttttactctattttttctatgtttagatacacaaatacttcccattgtgttacagttgcctgcagtattcagtacagtaacctgctgtacaggttcgtagcctagggtcagtaggctacaccatattatagcttaggtatgttgtactatctaggttggtgtaagtagattccatgatgtttgcacagtgacgaaattgcctaatgatgcatttctcagaaggtatccccgtccttaagcaaggtgtgactatgtgtataggctgctttctatgtgcttagcacccagaggcagctcccggaaatataatttagtctggtgtcagagagcatgcagtcaaagtagaggtcaagatatgagaagtatgaagtgaatgaatgtagacaggagggtcttaagcttggaaaaatgcaaaaatcaagtcaggaaagcacaggagtgagagggtgcaaagagtgagtttgatttggcaactggattggggcaggttgctcatccttataaaattatatggtagttaggtacttagctgaacttcagtagagatctcattgcttaatggggattaaatagtttattttctgtctcttcttcccttcccctgctcccaccaaaaagctaaggcagttttctactgaaggacgcatacatcgttaagtaagctagaaacaaaaagttagaacctcgggaaaacaagtatccagactatcctaatggtataggagctaatgcatatttggtgcctatcatataccaggcactgttcttgtgctttatgtatgttaaattgtttaaacatcccacagcaaccctacaaggtgggcactgttactcccattttatacatgaggaaacaggcatagagagattatatgggaagttgttggtgatcttgttgggtggttttattaaagtgggaagaaagaagccaagttgaagatggttaaaaaacaatgaatgatttttctttttaaagacagggtctccctctgttgcccaggctggagtgcagtggtgtgatcgtagatcactgcagccttaaactcctgggttcaagtgaatcttcctgtctcagcctccagcctcccgagtagctgggactcggctggcgaatttttaagttttttgtaaagatggggtctcactgtgttgcctaggctggtctgaaactcctggcctcgtgatcttaccacctccgcctcccaaagtgctgggattataggcgtgagccaccacacccagcccctgaatgaaacactttgaaaaagagtgagaaatgagcaagtgctgacacagtgggtgcagaccactcttttaagattagctctgaagtgaacaaagaaatgggttggtggataaaggaaattgtgaggctcagaaaatgagtgaaaatggcattgctgtatgtaggaaaggggatgcagagtacgggtagagagtttggccctcagtagaggagagatcttttccatctaacaggaggaaatgcagaaaagttgtgtgcccttgcgaggaagtttggaagttggaaggtgaaggcctattctcctggctttcatcttctctgtggtttctgtttgctcaatgaagcatgagattcatacgggcagaaagggatgggagtttggggagtttgaagcagtttgccaagaagtattgattgttcatttaaggtttaaaatcttgaatttaaagtgatatcagtcagcctggttttgtgaccccccacccccccagcattatttagctgattagttacaggcacagattaaggcaggtagttgaatttacccagggtgagattttgccaggtgtattagagttctccagagaaacagcaaatcggagttataggtaggtagactgagattttaaggcatttgtttttgtgagggctggcaagtctgaaatctgtagggcaggcaggaaattcttggtcaggagttaatactgcagccttgaggcagaattttgtttttctcagggaaacttgtttttgctattaaagccttaccaagtgattggatgaggcctacccacggtatcaaggataagctcctgtacttaaacttgactgtttgtagatattaatcacatctacaaaataccttcacagcaactacattagtgtttgaataactgggtactacagactagccaaattgacacttaaaactaaccatcacaccagatcagttcaaaagaaggaaagggggacaagggaaataaggaccttttaactagaatgcttattgtgtggtggtggttgagtgtgtaactggccacagggtttgagtaagttaacttgaaagattgaatgccatggtcagagtggaatacctgaaagagagatttcacaagtatgacaattattgacattaataatgctcaggttaactttgggtgtgggcttccgaggtggaattcagagacaaatcctgaacgtgaggaggccaatgagttaaagagtctgaggtattaaaaaagggtcagtctgcatgcatggtgaaatcagcaactagtgaggggagtaagggtacgtactgtaaaccagttgtaatgtcctcaatgaataaggaagaattggagggaggctagacgaacaagaaaggttaaaggtagtgtaacaggctaagtttgcttgtcacaaattgggaatttcagaaggccaagtaaaggaattaggaggatgaagaattgagtcaaatggaggacgtacacagcagtgtggcagtgagaattcagagaataatagataaccagggagagctggattttttctggtgaccataagcagggatgtgaggtatgagaggattagtcctgatacaggagatggtggttatcacttttagtgttgtaggactctgtggcagtgctttcagactgttactcatgacccattagtaggttatagaattttgggagatcacaatttctgttacgttgttaaaagaaatgaaatagaaaataccatagtgtgtcatgtgtaataagggactaagaattttttaacggttttattgagatataattcacataccattatagttatctatttgaaatatacagctcaaagcttttttagtatattcctggaataatggagccatcatcacagcctaactttagaacatgtttgtcaccccagaaagtaacctcatactcactagcagtcactccccatttcttcacacacaccccctcctctccctggccctaaacagccacttacccactttcttctctatagttttgttcattctggctatctcttttttatttttttgagatgacgtcttgctctgttgcccaggctggagtgcagtggcgtgatcccggctctctacagcctccacctcccgggttcaagcaattctcctgcctcagcctcccgagtagctgcgattacaggtgcctgccactaggcctggctaatttttttgtatttttagtagaaacagggtttcaccatgttggccaggctgatcttgaactccttaccccaagtgatctacccacttcagcctccaaaagtgctgggattacaggtgtgagccactgcacccagcgcattctggatctctcatgtaagtggaatcatacactgtgcgatcttttgtgactggcttatttcacttagcatgatgtttttaaggttcatgtatcatgtatcagtacttcgtttctgtttttttttcttttctttttttttgagacagagtttcacccttgttgcccaggctggagtgcaatggcgtgatcttggctcactgcaacctctgccttcctggttcaagtgattctcctacctcagcctccccagtagttgggattacaggcgcatgccaccactgccagcttattttgtatttttggtagagatagggtttctccatgttggtcaggctggtgttgaactcctgacctcaggtgatcccccaccttggcctcccaagtgctgggatttcaggtgtgagccactgctcggccttttttttttttttttttttttttttttttttaaattagatcaggtcttgctctgtcaccctgttacccaggctggagtgcagtaccatgatcgtggctcactacaggctgaaactcctgggctgaagcaatcctcctgcctcagcctcttgagtagctgggaccacaggcacatgccaccacacctggctaattttaaattttttgtagaggcaggctctccctatgtttcccaggctggtcttgaactcctggcctcaagttatcctcccaccttgagctcccaaagtgctgctgagattagaggcatgaaccacagtgcctgaccttcatttctttttatggtgaaatattatttggttgtacgatatgccacattttatttacctacacttcatttgatgggcatttggattgtttacactttttggctatagtaagtaatatagtacacaagttatgaatatgaacatttgtacacaagtttttttgtgttgtatgttttcatttctcttgggtatgtatccaagagtggaattgctgggtcatatgggtaactctatgcttattattttgaagaactgccaaactgtttttcaaagtggctgcaccattttacatttccaccagcaaggtgtgaagattccaaattctccacatcctattcaagcttgttattgtctgtcttgaaaatagccacctgatgagagtgaagtgatagcccattgtgattttaaattgcacttccctgatagctaatgatattgaacatagtttcatgtgcttcttggccacttttatatcttctggagaagtatttcagattctttgcctattttaaaaattgagttatttatctttttattacgttgtaagagtttttttttttttttttttttttaagagatggggttcttgctctgtcacccatcctggagtgcagtgatgcaacctgggctcactgcagcctcaaactcttgtacacaaatgatcctccctccccagcctcacaagtagctaggaccacaggtgtgccctgctaatttttaaaattttttgtagagatggggtctcactgtgccgcctaggtgctgtaactcctgggctcaagtgatcctcccaccttggcctccaaaagtgctgggattacaaacatgagcttccttgcctggccaaagagttctttatatattatagatacaagttgcataacagatgtatggtttataaatattttctcctgtttcagaggtagtctttttactttcttgatggcatcatttgtagcacaaaaagttttaatttcaataaagaaatccaatgtatttgtttttcccttgtgcttttggaatcttttataagaagccaatgcttaactcaaggtcatgaagacaacttctgcattttcttctgagttttatagttttagctcttacatttaggtctgtgatccattttgagttaattttatggtgtatggtataaggaaggcatgtgaggtaattcttttgcatatagacatgcagttgtcctagctccatttgttgaaaatactgttctttcttaccaaattgtcttgggcattcttgaaaaaaaggcagatttatttctggactctgaattctattccattgatctatgtgtctattcttaggttcccacggtgtgttgattactgtagttcagaattttttgaaagttgtgtttcacatagatgtgtgagtatatttatatatagatacacacagaggtgtgtgtgtaatgggttatgttggaaaatgttggaaaacctatggtgtctccccattagttcactcgcttgtggcaacttagtggagtatgttccctctcaggtaatatacagagaagacaggttagagggtctgtctgtgagtgtatgaattccttttagattggatgactgatttttcttactttagtaaagttttcaagtgcatgtggactgaagggcagtaaggagggcatagaacagctatgggaattcctaaagaattcatcagagatgaatgtaacgattatggagtgaagtatttgaaattttgaagttagcagggttttgtactgtgccagtctttcatgatttaaaaaaaaaaacttttttgaatatattaagcatgtctgtgtcggataacttaagacattatataaggaaaattatatagataatttaaggtttgggaatgatgctatctccttctagagaggatttttgttgactttggcaggaggcaagctagtggcactagcaatcccgaatcatcttaatccagtcagagactatgatgtttcaaaactgggttccggagtctacgaaggctggtctattttatgttttatttacttctaggtatgaccccttggagttctagcataaagccagggatgttatcagccccacatgcccccaccctcacactttcttgggcccttaactccaatatttaatcctctctagtcatgtaaatctattgcaagttcaagctcagcttctcagccacgtctttggaattggcagatcccttcagggggagaaatggccccggatgccagactcccttatgagcttttccttactctcccagatcttggtcttcatgctttttcactaccttggcactctgatgccctcaaacaggttttttggttttgatttttaaaacattttttctggggacttgggcaggtgtccagtttttctagttgctctcagtacgataattggtttgaattatctagttcaccattttaaggaaagcgatttgttaggttgatcaaggtttatgtcataagattctctgtttgaaattgtagtatatgtggtttcagtttttcctgagggtaagattttgggtaccagtttctacagattatagaaattattagaaaagggggaaatagccttaggaatagaaatgggagggaaaatggcagagaaaactagatatttttgcaaagtttgggaaagataaaggtatagggtaacattttcatgtctattaggagtgtaaaagggcattcatgtatcaaaggcgctgacatatttgttgtaatgatattgtcataattaaaaggctgtagaatctaggtattgtgggggtggctttgagaagtatctacttagtcgtgttgaataaaatttttaaatttcgcagagaaaccctaggatactgagtcattaattgaaggagtcaactttggggctggacttatggttgtgtcttatagcagtataaatctgcgcagccagtagtatgtaagggattgcagaaagaatttaatttcatagaacccattattaatatgagagatacaaaatgatactgattttgatttagcatgccatcttcatttatgtatgaaaataaatgtaaggtcttaaagagtttttgtttttgattctctaagctattcccatacttcttaaatttcaaaattacaaagttttccatacatcttaatcattataattgaggaaaaatggtatatctttaatagccccttcttctcttgagaaaatgatagatactgggtgtatttcagaaggttttatcagcagagttttggttgatattttaaactttttgaggataggaattgtttagtaaaatgatgccctctcttttttggctccatcttccagtatatgtgtcataggaacctggtttaagttcagtgtgtttctttgttacacctgtcagtagaatcggctattactgttttttggttccttacaactgaacattttggtcaccgtcctcacccactttttaaagtgacttcattctcccacatcactcccaactgaagaatgttcagacatacacattgaaagaatattacggtaaacacctgtatacttcatttggatattgtggttgttagcttttttgtcatattcgtttatgtctctcctaaaagtaaacacattctcttacatatgtcatacttaagcccttaatatctagttcatattcaagttttgctaattattcccccaaaaggtcagtttgtgctgcaaccaggtactgtgatttctcacctagtttccatagctcttgtgaaggtgttttcgtgcatggatagtgttcaaattgatgtttctgttaggggacaatcactggagagtcctattcttccatcttattctgcccctctcctccaaaaaggtcaacttgtaactgcttttttcaaaccaatattcaatcagtttatgaaccacatttgatcgttgttgctttagtcacttatacaacagttgtcctgttttctagtttttttttttttttttacactcatgatattggcttcttgaagagaccaggccatttgtcatatagaatgtttcccatattttggatttgtctgattttcttgtagcaattaacttttatctcaattcccactgtatttcctaaagtagaagattgagcctaaagactggattatatttagtttttttttggcttagttactcctgtgtacgttatattgactcataacacaggcatcaggtggtttgcctaaagtgtgatcatttggtgttaaggtggtattcaccagatctatccattataacaatgggtttccccttgacaatcagcagatcagtgagatgacgttttggttccctttgaatatcctgttttccagcagccttttacctgtgtgttgagtctcttggtgagctttgaatcagttatttcatttgggcttgcaaatggtgtttttttgtttttctaaccctatcatccttttttttttgagatggagtcttgctctgtcacccaggctggagtgcagtggcacaatctctggtcactgcaacctccacctcctgggttcaagcgattctctcacctctgcctcccgagtagctgggactacaggcacgtgccaccatgcctggctaattttcatatttttagtagagatggggtttcaccatattggccaggctggtctcgaactcctgacctcaagtgatctgcccaccttggcctcccgcctgtcatccttcttgatcaattaatattaaccagctttcctctgttaagaagacctttccctcttgtcaactgggattgaactacagttcttcctaacaagatgagataaatgtttatttctcttcaatataccaactctttttaacataccaattttgaaaatttaaccaatttggagtagtcatcttcaaaaagtggcacataactttcagtctctctgtatcacagggatttttgtttttttcagaagttttatgatcatttcagtcattctttttaaaatagtcttcatttgtagaagttttagttttacagaaaaattgagtatatactacagtttccatataccccagacccaatttctcctataattaacatcgtatgtttgcatggcacatttattacaattagtgaaaagtattggtacattattaactaaaatccatagcttattcagcttttcttagtttttagctagtgtttttgttttgttttttcaagatcccatctggaataccacattacattttgttgtcatatctccttaggatttcttagctgtgagtttctcagatattcctttttgtgattaccttgactgctcaaatattttgtaggataccgttttattggaatttgatgtttttctcatttttagactggccttatgggtttctagaaggaaaatcacagaggtaaagcatcatttcatcacatcctgtcaagggtatgtactgttaacataatttatgacttgattttgactttgatcacctggctgaggtaatgtttgtctgatttttccattgtaaagttactcttttttcctccttttcatactgtaatactggggaaaggtgaccatgcacagcccacactttagggagttatgtcctgcttcttgatggcagagtatctacataaattattaatatttggaatccttctgtgcaggagatttttattttctcccatttagtaatttgttcagtcatttatatcagtatggactcatggttgcttattttatactttgggttatagtccaatactattaatacttaattttgctacacacattgtttcagatttggccattgggaacccctttagttagctcctgtgcctgtgacatacttccatcggtgtgggtgttttgtgagcacttactttctggcactgcaggatactcccagctcatcttgtatgttttctaccctagtcctgggatcagccgtttctctaaggagcactgtttcctttaattagaaaatggtattagaaacaaagatctaggtgcccttgttgctactgggatgttgtgttttaggtactctcagcagatagagcaaataaatatattcatatattagaaatatctgtatatctatgtgtctagagagagatataagtatttaatattatatatcagtatttatatgtgcataaatatttgtaaccatctgtatctatataagctaaacatgaattcttaatgtcttcaactctaatctattaccatacggatcattcctggtcctcccgttactgaccagtaaatttcctccaatagcgggaaacctgcctcccagcacacaccatttatttacttagttgttcaattccaacataggtcttatagcagtatcagaattgttaactcacacccaatggaaacagctgtatcaactaggagtgttttttgtttgtttgtttgttttttgttgttcaattcttcagaaatttctaagtggacaatcatgtcatctgcaaacagaaacagttttatttcttttcccccctccgtctgcatgccttttcttcccttttattgtcttattgcagtatttaggactttaggtatgatgttgaataggagtaatgggaggagacatttttgccttattcttgttcttggggggaaagtagtttttcaccattaagtactatgttcactgtagagggttttttgaggggagtagagtagatttttttaaaaaatcaaattgaggaaattcttctccattcttggttttctgaccgttttcatcatgagtggtgttagattttgtcagacgctttgtctgcatccattgatatgaccatttgatttatcttcattagcctgttgatgtggtggattagggttacattagtagattttagaaccagccttgcatacctgggataaatctctcctggttatggtgaataattccttttctacattattggattcaatttactaatattttgttgaggatttttgttacctgtgttcatgaaagatactggtctgtagctttcttttcttaccatctctttgttttattattattagagtaaggctgctcttttagaataagtcaggaaatgttccttctgtttttattttctgcaagagattgtagagaattggtatcacttttttccttaaatgtttggaataattcaccagtaaaactgttcaggcctggtgttttctgttttaaaaggttaataactgttgattcaattttctaatagatacagatctattcagattattgatatagtttctttaatagttaacaggtttgttcaggttatctgtttttctttgtgagaactttggtagattgtgtctttcacagaatattggcttatttcatcttactaaatttttggtgtacagagttgttcatagtattcctttgttgtacttttaatgtacttgggataagtaatgatgacccctcttccatttgttacattagtaatttgtgccttctctctttttcttcttttgttttttttgagacaaagagtctcactgtcacccaggctggaatgcagtggtgcgatcttggctcactgcaacctcagcctcctgggttcaagcgattttcctgcctcagccttccaagtagctgggattacaggtacatgccgccatgcccagctaatttttgtattttttagtagaaatggggatttcaccatgttggccagggtggtctcgaacttcttgattagtctggctagaggtttaacagttttatttatattttcaatgagccagcttttttttttttctttgtattttcctgtttttaatttcactgattttgactgtaattcttttttttcttctgctcactttaggtgttactctttttgatgatcagttgtctcacatttggccagtgagagtctcttgaggtggctgctgtgtccattttgatctgacctggttgatcgttgaatgcttccttgctttctggcaggataaaatgtatttcaacctgtacttatcttgccttaacctgggacactccttttctttaggaagttggcttcagtcttaattttatgtgattgctcacttctttcatctaaactttaaacagatttgacacattgagatcagcacttttgcctttttttggtagtcaacaagagcaactgaggtgtcctgttgatgctagtatttaatgtcttaaaacttgtcttaaaaacagaacattttcctgttcaatttatataagcaaaaagacactttaactgtatccagccaaactcttctatggcatctctgaaagtaatttatactttgccagtttgtacttttgctaagagatagttgaaaaccacacctttttaagaagttcagaaattgaggatgcggtattctgaattatctaatttgatttttctgcatctctacagttgtttcattacttagtaaagcgtttccaactttagcttcagggtttttcttttacttttaacaaatattatgtgccaacacttacaaatagtaactcatttaattattttaaccttgctggtagatatggttattctcctctctccctcatagatggggaaactcaggcaagatgaagttaagtaacttgcgcagggtcatacacgagtggcagggccagagtctgaatccagacagttggctccagacgccagactcctagccactgctttgtgctgcccctctttcctctgctagttaagtcgaaaaagttgtttgtgattctgcatcttgctttcctcttctcttattaattatagtataatgggtgtcactcttattaccataagccttagtatggcattgcgagcaccagttaattaagcaataacgttttgagatccctaattggaagaattcagagcggtgtattgctttgagttagttggccctttgctgcaactctggccatgagacaacgttatcttgaatagtgataatgtgtaaaaagatgaggcctcctttttttttaaaaaaaaaattaaattcatttagagtatgaattttaaagtagtgtagtcagtgatgatataagatcaaagaataagtgaaaacacttcataaggcacagagagctaaatgtgtgtaactgttttattggtgtacatagttactgctggaactacagaggaagaatcattattttatgggaagaacatatgttactggaaatcctagattcttagatcacaattctaaattccagttctttgatgtgttaacatagggtccattgcatcctatttactggtttatttttatccttgctctgcttcttcataattgtaattaagtaaaactttctggttccccaaggtcagggcatactctttttgaaaataatattaactactgctgatgagaggaagagagcaacaggaagcatttaaaaaaattttttttaaactaacggcaaatataaaatatttaggaaaaaggtaaagattaaaagtacctatagctagtaatattttggtgtacttctttttatgtattttgtgcacatgtgagagagatttatatacatgggtacacacatgtataatttgtaaggatacaaaaatcatattagcttacgttaattgaggactagagtactgataactgcttttatttaagtctaggaaatagattttgtttaaaagaaatgtattcttaatagagaaataatttttataaaataagagatttgcagcattgctttttttgtataagtatgctaagactgccatctctttatttaacaggaaggagttttaaactttaacttaataggaagatgtttcaggggttctctgaagtcaagaatgttttcatataatactagaagtgttatttgcctttttcatgtctgttctcaagagtttttctgaggccatgtgacttgccctgtgatgtggcaacagactgtatagaagcaaatgagagaacccagctgtctgaaattaagccagaccataaagggatttgcagaaatgtagaacaatgtgtgagaaacacattcacccgtccaaacccaatgaatggactcagagacatgaagaacagcggaagtgagactttcaatggcagtcttgcaagatcaggtgtctggtaggcaggcacacccggggcaggtacagcaggtaatttatctcctagcacgcaggtctcttccccagttcctcactggtcgagtactatggggttacagtcttcccggacgttgcctaagtttcattatcccccttaaaaggttatactccagtccccttccccccgtaactttcaatttcccaatagcaaaactttcttcccttttatgggctgacccctcctctacattctgatcacttatcatgactttataggtgcatgagccatgcaatttgtcacatccgcaggctgactgccagtacttagatttgtttctcggtctagaatggatggattgtcattggtgatgagtataggattgcattctaaattgtggcagttatttggcagggagcccttggacagatgtagtttattcttcaagggtctccagcttagagttacccaccccgtttactgtccaaccctgaaaatgggtagtctaccatacatcatcccagctgggtggggcaggatgatgctctactgtaacctgtatctggttcagggcaaaggtacttatctgcctgcgagagctatccctgattttccaaattcccacaaggtaagacctggcaggcatcaaatcttacagtctgggatgctactgtcttggttacactaattaccaacctcattggatagggaggagtcccctgccagtttccattttgaccttctgctttttgtatagtagcccatcccagccatattaacttcgagaaatggggccaacccatgttttctttttagatttttctcagagttaactttaagggttcctcagtgcactttccactggtcttttcccctcccttccagggtctcttttaccaatcccttgactcaaggatagtgagtccacccctgttcagctgtttgcacagctatcttagtggggaccttcccagcttgggtggagcttgtcttctttccaaatcttaatcagcaccaagttgccaggctggaagtggtgaaccgtgaactcaagaggtggcatttgagtcagaagtcctcttaacctaagggatgacagggtggaggatatggccagtatataatttcttaagcattgatccatggtttccatagtagggaggatctgtagctctgcccaaatatgggtgcccctataataactcatagggggataatcccaagtattttcttggggctgtcataatcctaaggagtactattgggagacatttggtccagggtattttagtttctagattagtttggtgattatgctttttgagagtttgattcattctttctacctttccagaggaagggggatgccaaggggtatgataatctcatctaatttgtaaaccttccataattccccttaacacccttgagataaagtggctcccattgtttgaatcaatattttctaccaggtcaaatctaggtacagtctgttctaatattattttgaccacattactggcagtggctgttggaaggggaaaggcttccacccagctggaaaggtgacctacgatcaccagtaaatatatcagtcttcctcctttgggcatttctgtgaaatctacttgaatgctttgaaatggtcttagtctgggaggtcttcctcctgtggcctgttttctgatcacctttttgtttatcctttgacaagttacgcaacttccacatacttgtttagcaggggtataaatccctgtacacccataccctgttgcatcatgcagagtcggggatccccaatgactccttttgtgtaatatagacgttagctctctcatcaggggtttacttatttttcttccatcgggaagtatccatctcatcttcagtttgagtgacccctatcctgtctaattcttctttcttctctctgataaactggggccttaatactaccttagggatgtctgggatcaggctaaatagtctaatttcttcctccagggaggcttgcttagcagcttcagctgcaaacctgtttgctacagcttctgtggtgttccctttctgaaaaccatttacatgaactatggctacctctgctggaagcaagaggctttctaaaacctgtttggccagttccaaatgtaccaattattttctcctgctatttattaggccccactctgtccagatttttccaaaagtgtgtaccactttggattttaagtaggcatacttaaattcagtgtatatagtgcctttttggccttcaaggagctttagggcctggttaagagcataataattcacaggtttgggctaaccagcaattaggtaatcttcctttctcacataaggagtgtttatttccatcaatgacaccatcactgttatgtcccttgccatctgtcactggagacagcccatccacaaacagccttatctcatcatgtagtagagcttccctaaggtctggtctaactttggtttggtattctatgatacctaagcagttatgatctgatgtctctttgttctcctctcctttccctagaaaactgtctggattcaggcaagtatttgttgttacgaccaagtcatctttttctagtaatacagcctcatattttagaatccgagaatcagttaaccatcttccagctctttgatttaatatattcctgactaggtgtggggtgcttactattagggccccaccaaaggttagctttctagtctcctctaccagcaggtctgtggcagctattgtttgcacacatttgggctacccttgagagacaggattgagaagcttggagacaaaagcagcaggttgccttttcccaccccatatttgagtgagcactccaagggccatgccctagtctactgttagaaacaggtggaatgggttctctaaagatgggagggccagggctgtaatgagggcctggtttagctctttcactgcctgaatttcttctgaggaccactgcaagtgatcaggttcctcttctaataacttgaccggccggatgcaacagggaaagaagaaggggtggggacacggggcagagccagtcctcctgtttggggcctgggcctaggaaagctaactaggggcaggaaaggggagccccaggctgtggatgcctctgcgggggaacgttgggtcagcaacggccagaggaaatcctaaggccaaacagtatctgtggcctccctacctttgggcatcttctggtcgccaatttgctgcaagtcacagctcccaaatctggttgtgcaggctccaaagcagtggagcctggcgcttctgccatctccacctcctggatctcagagctgctggatggctccacccaccacccgctgagctggccccacttggggctggcattggtggacagcatgttccgggcgcctctgctcctctttgctggggcctgcacctttcctggctgctgactcatagatgtcagagctgcaggacggctccacagaagccctgtgtttaggacacctcattagtgaaggagagtggagagtaaacccaagggactatccagaggaatgtcagatggagtctctttggctccctctttcctttgtcccctaagcctagaatttctgtttctcattttcagtcagtctctgtgtctgagcttttccctgtgtactcaactccccaactggaggtttcttgcacaccccgagaatcgctttgtctgtctctggccgtttccctcgcagaacggaactgcagattgggactctgcacttgccttatatctgggatacgtctcagtcacacacactcgacctccaaaaatgcccaaccaccaaggcagtacttagagtccaattttcctaccttggcttgtgcatgaggtttcctggttgctgcagtgcctgcttttctccgtatgtcacctccactgcctcctgaataacagtctcaggtttgtctatggcctttgcaaggagctgggacactcagacagagcgggccacctaaatcgggtgagattcatctcccttttcggccggagtctgactctacgcaggcataaagatcccagacgggcccccaagtttgtaagggaaacattcacccgtccaaacccaaataatggactcggagacatgaagaacagcggaagtaagacttttagtggcagtcttgcaagatctaggtgtctggtaggcacacacacccacggcagttacagcaggtaatttatctcctagcacgcaagtctctcccccatttcctcactggtcgagtactatggggttacaatcttcccagacgttgcctaagtttcattatcccccttataaggttataccccagtccccttcctcacttaagtttcgattttccgatagcaaaacttttccctttcatgggctgacccctcctctacattctgatcacttatagtgactttctaggtgcatgagctgtgtggtttgtcacatctgcaggttgactgccagtacttagatttagcatgccttgaaaatggatcatttaaaatgttttctcacacaatggcactcttttcaccaggttttccttttttttaaattgtcgttttccatcaaaattctagttaatcatgcagtggaagtttattatgtttaaataaattttaaaaagtttaagtgctcacttctgtttaatatattaaatattgatatatcaacataaataaaagcttctgttaacaaagttctttgtttaaaaagtataaaggaatagtgataaccaaaaagtttgacagctgccatattatataatatcaaaaaattatttattacttactactcatctcaccagcaaaatcattggatcctgcacagggatagatacaaattttgcaaaattttaattttcacttgatagttttaattttttcattggcaataaatactgtcatttatttttcttgaagtgataggcacactttgttcattttcaagaaaatgtcttccacataccctagcccaaataacatagtttgtgtgtcattctttcaagtaaaaattgtattatttaaaaacatgtctcacaagtgcttttcctgcaatggcccctgtacttcagtatatagcaacagtgcttatgtatacttcccatttcatcataacagataatgtggatattcctcttttatatgtgctacaccagaatttaacaaggtaactgcagggagaatctgaaactatattaataaatttttcatattctattatattaaaatccatttgtctatcttgcgttttaaatgagtgttttgcccatttataagtttgaaacatcatgtattagtcatttggaaaatactgatttagtgaggcctgcagatctttcaaatgtgtttctttataccaccattgtcatagtgtggtttgaggactgacagggctagcagaaaactccatctgtatcaggtatttgacggtcaagatttatgtaattaagaatttttggaaatagtaagattgttaaatttctaccctgactgatgagtattaaaaaaaagaaccacagattatcagtatgtggagtgaaagatggacatcacaacatatatggcagatattaaaagaataaaggaatattataaacactcaaaagctaagaaacaatgtagatgaaatggaacactcttttaaaaaatattcattgcccagatttacacaagaaaacagctacgtatttattaaggaaattaaatttgcagtaaaaaagttcctcacaggccctgtgatatcatgagggaataatttgatgtggctcctacttctaaaagcagcaattctcaaactttttaagagttttggaatgtctgtgttgttaaaaattattgaatatctcaaggtgctttatataggctatagctattgaaatttactctattagaaattaaaactaagaactctaaaaaatatttattcatcagttcattgacaaagtaataacccagttaaagttaacataaaattttatgaaaaataactttttcaaaagaaaaaataatataacctattgtgataaccctgtgggttgcttagcccctggaaaactgctgtacacatgtaagagaatgccagtgaaaaaggcaaaaggtaggcatttctggaatggaacttttatttctcagcactttataggttttttaaagagaaggtgttgctattgttgtatcagataacacagatattaaaccaacaacagtaacaaaagacaagggcattatataatgacaaaggatttaattcaacaagatttgtatctcctaggtatatatgccatacccagtgttgtagcacccacatttataaaacaaatactactagacttaggaaaacgagacaaccacacaataatagtggaggactgcaacagcccactgacagcactggacagatcaccgcagaaaactaacaaattctcgacttaaattgaagttttgaccaaatggacgtaatacacacgtacagaataccctacccaacaaccacagaatacacattttactcatctttgcatgctctaaaaatgaccacatgctcagtcataaagcaagtctcaataaattcaaaaaagcagaaatcataccaagcatctgtttggaccacagttgaataaaattagaaatcaataccaagaataactctgaaagccacgtaagtacatggaaatgaaacagtttgctcctgaatgacgtttggctaaacaaaattaaggcagaaatacaattttttttggaacaaatgaaaatagaaacaatatatgaaaacctctaggatatagcaaaatagagttaagaggaaaattttagtgctaaattcctacatcaaaagaaagatctcaaattaacaacctaacattgcccctaaaggaactagcaaaataagaacaaaccaacctgaaagctagcagaacaaaagaaataacaaagatttgtgcagaactaaacagaattgagaccaaaaaattacacacagaatcaacaaaacggaaagttctgtttgtccttctaaagggtaaacaaaattgatagactgccagctagatgaaccaagaaaagagagaagattcaaataagcacaaaaatggcaaagatgtcattacagtggataccatagaaatacaaagatccttagagactactgtggacatttttatgtgcacaaactagaaaatttagaggaaatagataaacatctggaagcacacagccttccaagagtgaaccaggaagaaatcaaaatcctgaacagaccaataacgagttataacgttgaatacataataaaatctaccaaccacaaaaagccctgaaccaaaaggattcatagccagattttactagatgttggtagaagagctgataccaatcttactgaaactattccaaaaaaatcaaggtggagagatatcctccctaactcattctttgaaaccagtatcatcccaatatcaaaatctagcaaggacacaacaacaaaaagaaaaacagaaatgcaggccagcatccctgatgaagatagaggcaaaaatcctcaacaaaatactagcagactgaatctagcagcacataaaaaagataattcaccatgatcaggtaggttttttcctagatacaaggatggttcagaatatacaaatcaataaatgtaattcaccacataaacagaattaaaaaacaaaaaccatattcttatgcagtaaaatccagcatctctccatgataaaacctcaacaacctaggcatcagaggaacatacctcaaaatagtaagagtcatttatgacatacccacagccaacatcatcctgaatgagcaaaagttgaaagcatttcccctaagaaccagaacaagacaaggatgtccactctcaccattccttttcaacatagtactagaagttctagccaaagcaatcagacaaaagaaataaaagatgtccaaataggcaaagaggaagtcaaattatatgcttgttgatgacatgatcctgtacctaaaaaaaccctgaaagattccccgaaagactcctggacctgagaaacaactccagtaaagtttgaggatacaaaataaatgtacaaaaatcactggcatttctatacaccaataacattcaagctgagagccaaattaagaactaatttacaatagacacacacaaacacacacaccacacacacacaatatctagaattacatttaaccaaggaagggaaagatctctacaaagaactgtaaaacactgatgaaagaattcatagatgacacaaacaaatggaagaaacgtcccatgcttgtagattgaaagaatcaacattgttaaatgaccatactgcccaaagcaatctacaacttcaatataattcctatcaaattaccaatgtgattttttttcacagaattagaaaagacaattctaatattcatgtggaaatacaatagagcctaaataggtagagcgatctaagcaaaaggaacaaagccagaggcatcatattacccaacttcagactatactgcaaggctattgtaaccaaaatagcacggaattggtacaaagatagacacatacatcaatggaacaaaatagagaacccagaaataaagccacacacctgctatgaactgatcttcaactgagtcaacaaaaataagcaatagagaaaggataccctattcaataaatggtgctgggaaaactggctagccatatgtagaagaatgaaaatagactcctacctctcactatatacaaaaattaactcaagatggattaaagacttatttaagacctccagctataaaaattctagaagaaaacctaggaaaatatcttttgaacatttaaagaatttatgactaagatcccaaaagcaaatgcaacaaaaacaaaactagacaagtggggtttcattacagagcttctgcacagcaaaagaaacaaacagggtaaacagcgtacagaatggaagaaagtatttgcaaactatatatccagtaaaggactgatatccataataaataaggaatttgaatcaataagaaaaaataactcgattaaaaagtggcaaaggacatgaacagaccttctcaaaagaagacatacgagtggcgaaaaaaggtgaaataatgtgcaacatcactaatcatcagagaaatgaaattgaaaccacagcaagataccatctcatagcagttagatggctgttattaaaaagtaataaaataagacatgttggtgaggatgcagagaaaagggaacgcttacacgctgttggtgggaatgtaaattagtacaacccctatggaaaacattctggagatttctcaaagaactaaaaatagaactaccattcaaaccagcagtctcattactgggtatctacccaaaggaagagaaatggttttatcataaagacagctgtgcttgcatgtttgttgcatgcagcactattcacaatagcagaggcacagaatcaagtgttcatcaacagtggattagataaaagaaaatgtggtacatatgcaccatggatactacagagccataatcaggaatgaaataatgtcctttacagcaacgtggatgcagctggaggccattatcaagtgaattaatgcagaaacagaaaaataccgtatgttcttacttataagtgggagctaaacagtgggtacacatggacgcaaagatggaaacagtagacactagtgactccaaaaggaggctgagggggtagggttgaaaacctccctcctgggtactatgttcactatttgtgtgatgagttcaacagaagctcagaccccagaattatgcaatgtacccatgtaacaaacctgcgtatgtgccccctgaatctatacttaaaataaatatactcataattctctattaaatataattttcactataaaacaaagttttagttttcttatctctgacttgtgtagtttcagatgagaagtctgttgtaattcttagtgtttctgaataagttctaggaattgttcatcttatagtttcctggcatttgccctttgcctaagacttgtgaggttttgctttatgcatgtgcaaattagtattcaaacaaaaacataagaggatccctatgccaatttctggtgctctctattctctgaatctctctcttctctctatactgccctacaaattctagtcaccttcacctccttgatctgtctcctcaacttggcaaagtttccatactgtgtttggtgtgaccctttctgcacagtgttctggaaagagcctcctgccagaatggcaggacagttataggacttacctaatttgttttccttctgtctgttgctagtgtctgacaacagtttcttatattctgtccaatttctagttgttactgtaagagggtaaatctgatcccaattactctaccatgttagaagcagaagttatattaatttttatttttagagttgcctcaagaactgctgttctaaaataaactgaaccctatttaatatataatggataatactggacagtgaaatgttttttccttaggaaaatctaaacagctgtgggtctgggttaaaccatattaacagccttgctaatgaaatgtaaaaagtaaaagaagaaacgttaggtgcttccaggacactcatacttgaagtacaggttgaacatcccaaatccaaacatctgaaatctgaaatgctccaaaatatgaaactttttgaatgccagcatgacgctcaaaggaaatgcttattcaagcatttgggatttgggatgctcaactggcacatatataatgcagatattccaaaatctgaaaaaattagaaatgaaacactttttggttacaagcattttggataaaagatactcaagctatagtagatttcatttttcaattggtaaatactgtttggtgcttattatgcgccaggcagtatgcttagacttcaagatgagtaaatacaacaagcattacctatcttcttggagtttatagtctagtgaagaagaggattaattgtaaaaataaacaattagaactctgatgagtacaatgaaagagaagaacatggtgccatgaaagtatataaagatacctgatttaggatggacagacagggaaagcttccctgagaagctggtagctgagctgaaatttgatacttgaaggatgagcaggagctcaatagtaaggagaaggaagtaagttgagtagaacatttgcacagcaatctaggctgagggaaagcacatgcagaagcgatcaggagagagcctggcatatgccaaggaactgagggaaggctaatgcagttggactgcagagagcaatgttttggagggagtggtggaagatgtggcaggagaagtatgcagggcctatatcacacaagactgagtacaagttattcagaatttattcattcattcatttatttattgagacggggtctctgttgcttaggctgcagtgcagtggcgctgtcacggctgatcacagcctcaacttcccaggctcaagcgattctcccacctcagcctcccaagtatctgggactacaggcacacaccacctcgcccatccatttttaaaatattttgtagagacaaggtctcaccatgttgcccaggctggtcttgaacttcctggtctcaagcagtcctcccacctcagcctccaaaaatgttggaattacagccatgagccaccacacctggccataattttattttttataaaaaaaaattttacaataaaattcagatttgttcttattgggagaacagtagaagtcattgaatgaggaatcagtgagcagattttaaataagaaaacataattttgttattgtgaagaatggatagaatatggcaaacctattagggaactattgcagttatccaggaagacatgatggtagcttgaaatgtagtcgtgtgaatggattcaagagagatttagagggaaacagtataatcaacctgttgttgataggaggagtaactcctcagagtagttgtgggtaatggaatacatgtttctaccgtttgctgagacaacaccggaagaggaccagattggtttttggatatgttgaatttgaggtgccttttgaatgtccagatggaaatgtcatgtaggcatttgagtttgaaatcagaggagagatcagaattggaactcacacttgggttttattatattgaggtagtaattgctgtgggtgtgaatgagattagccagagcaaaggaatatagaaagagaagagcagtcctgtattttgaggaattccccctattgaatatccaggtagaatagtgaatcattaaagaagcctgcaaagaactgatttcagcaaacctaggacagtgaattattaaagaagttaccgtgtgttgctttcctatggctgctttaacaaattaccagttctactggcttgaaacaacagaagtttattctcacagttctagaggccagaagtctgaactcagtattagtaggctggattcaaggtgtctgtcaccagggccatgctctctccagagtctccaggggagaatctgttcctttcctcttccagcttctgttggctgctggcattccttggcttatctccacatcactccagttactgcctacacggtcagattgcctcctccttttctgtgtgtctaatctccctctgcttctcagacagctgtaatgacatttagggcccacaagataatccaggacaatctcatctcagaatctttaatgacatctgccaaaatttcccataaaagataacattcgcagcttccaaaggttaggacccagtatcttcaaggtagcatttttgaacctgccactcaagggaagaaaatgcttcaaggattcaattgatcagcaatgtcaggtgtttctgaaagattaaatgtgaatttaaaaagtccaatcagtagcctcagagagtggaagccagattgagaggtgttaggagttaataaggtgttttgtagctagacgttgcaagatttcttgattgctttttctctgtgagatggaattattggagattgaaattttgaaaagaatggagaaaattttgtgttggagagaatggaaagtaattttaacaaagagggcattattgtatactcattgtatactgttgataccatgcatgaaatgatagctgaatcgtctgtcctcttgtgttactttgtccatttgcacttggatatagctatggagaaagcagcttgctgggttcatctggggttggtattttgcaagacaggaatctaaggagtttgatatgttggtttgcagtagtttgaatcctctactgcttaccccgtgaacatttttggtgtacctccactctgtcccatttagccaggatttacttaaggaatgcaaatgaaatagttggtaaaatagaacaatatcagagtaaacaaagatcacatattttcactcttaattatgggtcccctctgtaaccacaagaagcaacgatagttggtcacttctgaaaattgttataatacagtccagatgtgacttagaaagtctagggtaacagatttgctttttctatatgcatttttaaacctgcacagattttgtcagctacttttgtttttagtgctatttataactccctgttgcctttattcctaaagagctactgctgtttaagatggttgccagattggccatctgctgtttcccactagtcatcgatttttcatcaggtacataaccaaagcatttcttcttttcagtccttttggggagtttcacatcagtccactgtatagaagctgatagaatattttggtggtggcattctcagcatacatttctgaactggcagactgttttcttaccaggatctcattgttgatatactgcctagcttcctaatgctgcaagattaatcttcttgagtaatttaaattcaaaatgtatttttaaaatatcttctataagcaaggctacaggctgaatacttttagaaatttaaaaaaattaattaaaaattttctaccttccaaatgcatatagttcttggggagacagtgtgtttgtcaatatgcccaaaccatataattagaattacaaagagacaaggaaaggtaaaatgctgtataagaattcaggaattctagataagattgtgatgtgattgtgcatatctcgcattctgtcttcctctttgtccaccgaaatccaggtagagtcagtaaacaaaatctaagtagatgctttctaaaagaaaatcatctaaaacaaagtgatacagaagggttaaaagttttttaaaaaaatccgtgaatgcttgaaaaagattgtgcaatttcaaaagaaaccaagaattgtaataatataagatgcggcagaattcaaggcagaaaacattaaacagaaaggatcattttttaatagatcatagtgggagattttaaccattgtctctgagagtaaagtattcggagaataagcaagaccataggagatactaagagatctagataaacttggcaggaacttccggtttcattgcttgacccaatacttctgtgaattacccactttatttctttattgttaaccctctctctcaactattgggtaccttctcaatttggttaatgagtcacttggcatacagttctcgggttctttgacattttctggtagaaagtgaatcctaagtattttgcgaaataaatttcagggttcttgtagagtcataaagaggcaaatgaatgaaatgaattaggcacatttcttttgagtccaagatctaattctgttcacacacacacacctttgcctatcaagcctaaccatgaagaaaatgatacgtaaacttctaagtgatatggtacacatttctgcttccaaaatgggatagatatacttttccatagttttacctattattcttgctaagtagagctaaaatccctggacattacatttaaaaacaaacataagaaaacagaaaaatggagagaactgggtggatctgctcaggacccagataatatcacagtaaaagtcctgagttttcttattaccttatgtatttcagaatggtgcagaaaagctggcaatccagaaatgttgggcacagacaaaagccccaggaaaaaaatgatgctctttagctggggaccaggaaaagggtagcctagcaagacagaaaataaccacttcagccaaagaacatagaagagtcaccctgattagcaaagaccaagtgaggacctagactttcacagtgtttaggctgtaacaagacaactcctcactccatagtggcagcagagccaatatgggaagcagtaaccataggcagggagcctgaactcccacgtatgcttaatatgagtcccgtcttcccttcacccccaagttctttggtatacaaaagcctgtgggcggcaagccacccaggcaccgaggcaagagacaggggacacgagctgttccagtataataaaatataaaacaagaatagttataccagatatagatcttagatatgattatatatgaatatcattaatcattagtttgtagcaattactttttattccaatattatgataatcctcactctataatcatagtctaggaaaaaccaggccatacagagataggagctgaggggacatagtgaggtgtgaccagaagacaagagtgcaagccttctgttatgcccggacagggccaccagagggctccttggtctggcagtgacgccagcgtctgggaagacgcccgttaccaggcggatcgtggtccagcagtagcaaaaggtgtcaaggaacaacacccgctccttagcagactgggaagcaggggggagggtctccctttccccgggggagtttagagaagactttgctcctccacctcttgtggagggcctgacatcagtcaggctctcccacagttatccggaggcctaaccgtctccctgtgatgctgtgcttcagtggtcccactcctagtctgccttcatgttccatcctgtacacctggctctgccttccagatagcagtagtaaattagtgaaaatactgatagtccctgatatgcagaaataatggcgtaagctgtctttctctgtctcctctccctctctgtctcctctccctctctgcctcagctgccaggcagggaagggccccctgtccagtggacatgtgacccacgtgaccttacctatcattggaggtgactcacattctttaccctgccccttctgccttgtatccaacaaataacagtgcagccagacattcggggccactaccggtctccgcgcattggtggtagtggtcccccgggcccagctgctttttctcttgtctctttgtcttgtgtctttatttctacactctctcgttgccgcacacagggagggacccaccgaccctgtggggctggtccctacaaaagcctagtgagaaacctgcacttccaccccccactaggcattttttccaccagagcaatgtcaaaggaagcttactataatggaatattaaaagtagatccagtcacctaatgtaataacccaaatatccaggtttcaatgaaaaaaacctctcataccaagaagcaggaaagtgtcagctcaaattagaaaagacagttaatacatgctgacactgaaataacacagatactagaattatttgacaagaatttttttattgtactttaagttttgggatacatgtgcagaatgtgcaggtttgttacataggtatacacgtggcatggtggtttgctgcacccatcatcccgtcatctacattaggtatttctcctaatgctatctctgccctagctccccaccccgcaacaggccccggtgtgtgatgttcccctccctgtgtccatgtgttctcattgttcacctcccacataagagtgagaacatgtggtggttggttttctattcctatgttagtttgctgagaatgatggtttccagattcatccatgtccctgcaaaggacatgaactcatcctttttgatggctgcatagtattctatggtatatatgtgccactttttatttatccagtctgtcattgatgggcatttgggttggttcccagtctttgctgttgtgaacagtgctgcagtaaacatacatgtgcatgtggctttatagtagaatgatttataagcctttgggtatatacccagtaatgggattgctgggtcaaatggtgtttctggttctacatccttgaggaatcgccaactgtcttccacaatagttgaactaatttacactcccactaacagtgtaaaagtgttcctatttctccacatcctctccagcatctgttgtttcctgactttaatgttcgccattctaactggcgtgaaatggtatcttgtggttttgatttgcatttctctaatgaccagtgatgatgagcttttcttcatgtgtttgttggctgcataaatgtcttcttttgagaagtgtctgttcatatgtttcacccactttttgatggggttgttttttcttgtaaatttgtttaagttctttgtagattctggatattagccctttgtcagatggatagattgcaaaaattttctcccgttctgtaggttgtctattcactctgatgatagtttcttttgctttgcagaagctctttagtttaattagatcccatttgtcaattttggtttttgttgccattgcttttggtgttttagtcatgaaatctttgcccatgcctatgtcctcaatggtattgcctaggttttcttctaggatttttatgtgttatgtcttacatttaagtctttaatccatcctgagttaatttttgtataaggtgtaaggaaggggtccagtttcagttttctgcatatgactagccagttttcccaacaccatttgttaagtagggaatcctttccccattgcttgcttttgtcaggtttgtcaaagatcagatcgttgtagatgtgtggtgttatttctgaggcctctgttctgttccattggtctatatatctgttttggtaccagtaccatgctgttttggttactgtagctttgtagtatagtttgaagtcaggtagtgtgatgcctcgagctttgttctttctgcttaggattgtcttggctatacgggctcttttttgggcatgtgcaaagacactcataggctcaaaataaagggatggaggaatatttaccaagcaaatggaaagcaaaaaaaaaaaaaagcaggggttgcgattctagtctctgataaaacagactttaaaccaacaaagataaaaagacaaagaagggcattatataatggtaaagggatcaatgcaacaagaagagctaactctcctaaatatatatgcacccaatacagaagcacccagattcataaagcaagttcttagagacctacaaagagacttagacccccgtacaataatagtgggcgacttaatacccaactgtcaatatcagacagatcgagacagaaaattaacaaggatatccaggagttgaactcagctctggaccaagcggacctaatagacatcgatagaactctccaccccaaatcaacagaatatacactcttctcagcaccacatcacacttattctaaaattgaccacataattggaagtaaaacactcctcagcaaatgcaaaagagcagaaatcataacagtctctcagaccacagtgcaaacaaattagaactcaggattaagaaactcgctcaaaaccacacaactacatggaaaccgaacaacttgctcctgaatgactactgggtaaataatgaaattaaggcagaagtaaataagttctttgaaaccaatgagaacaaagacacaatgtatcagaatctctgggacacagctaaagcagtgtttagaaggaaatttatagcactaaatgcccacaggagaaagcaggaaagatctaaaatcgacaccctaacatcacaattaaaagaactagagaagcaagacgaaacaagttcaaaagctagcagaagacaagaaataactaagatcagagcagaactgaaggagatacagacacggaaaacccctcaaaaaatcagtgaatccaggagctggttgtttgaaaagattaacaaaatagactgctagtcagactaataaagaagaaaagataaaagaatcaaatagacaaaataaaaaatgataaaggtgatatcaccactgatcccacagaaatacaaactaccgtcagagaatactataaacacctctatgcaaataaactagaaaatctagaagaaatggggaaattcctggacacatatagcctcccaagactaaaccaggaaaaagttgaatccctgaatagaccaataacaagttctgaaattgaggcagtacttaatagcctgctaaccaaaaaaaagcccaggaccagacggattcacagccgaattctaccagaggtacaaagaggagctggtaccattccttctgaaactactccaaacaatagaaaaagagagacttctccgtaactcattttatgaggccagcattatcctgataccaaaacctggcagagacacaacaaaaaaagaaaatttcaggccaatatccctgatgaacattgatgcgaaaatcctcagtaaaatcctggcaaaccaaatccagcagcacatcaaaaagcttatccaccatgatcaagtctgcttcatccctgggatgcaaggctgtttcaacagatgcaaatcaataaacataatccatcacataaatagaaccaatgacaaaaaccacatgattatctcaatagatgcagaaaaggcctttgacaaaattcaatagcccctcatgctaaaaactcaacaaactaagtattgatggaacttatctcaaaatagtaaaagctgtttatgacaaacccacagccaatatcatactgaatgggcaaaagctagaagcattccctttgaaaaccagcacaaggcaaggatgtcctctctcactactcctattcaatatagtattggaagttctggccagggcaatcaggcaagagaaataaataagggttattcaaataggaagataggaagtcaaattgtctctgtttgcagatgacatggttgtatatttagaaaaccccatcgtctcagcccaaaatctccttaagctgataagcaacatcagcaaagtcttagcatacaaaatcaatgtgcaaaaatcacaagcattcccatacaccagtaatagacaaacagagaaccaaatcatgagtgaactcccattcacaattggtacaaagagaataaaatacctaggaatacatcttacaagggatgtgaaggacctcttcaaggagaactgccagccactgctcaaggaagtaagaggggacacagacaaatggaaaaacattccatgcttatggatagaagaatcaatatcatgaaaatgaccatactgctctaagtaatttatagattcaatgctatccccatcaagccaccattgactttcttcacagaattagaaaaaataactttgaattttttttttttttttttgagacagagtctcactctgtcacccaggctggagtgcagtggcatgtgatcatagctcacagcaatctcaaactcctgggcttgaatgattgtcccgcctcagcctcctgaggtctcgctatggtgcccaggctggtctcaaactgctgggctaagcgatcctcctgccttagcctcccaaagtgttgggattgtacccatgagtcatggcacctcgccctgacacaaattttaaaggagtcatcaagacagtgcttcaacaagcagttatgaacatgcttgaaataaattaaaaaaaaaggaagttttcagcatagcaaataaataggtaaagaaaaaccaattggaaactttataactgaaaaatacagtaaccaaaataaaatcttaatgggtaaaactgtagcaaaactgacacaaaaaaaagaagacacaaatcatcaggagtaaaataagagatacaggttgagtatccttcatctgagatgcttgggtccaaaaatgtttcggatttcagattttttcagattttagaatatttgcattggttgagcatcccgaattcaaaaacccaaaatctaaaaatgctccagtgagcatttgctttgagtgtcttgttggtactcttaaagtttcagattttggagcatttcggatttcagattatcagatttgggatgctccaccactctggagcctgtggacatgaaaaggatactatttttaaaaatctacagaaataaatttgacaactttgatgaaataaactaagttttcagaaagtacaacatactgcaagtcactcagtatggcatagataatttgaatagtgctacaacttaatagaactttataattttaaaatgaaaataggcccgaatgatttcattggagaattctagcaaaggcttaaagaagaatttacactatttctgtgtagtctctgccagaaaataagggaatacttcctaattcatttatgaaatcagtattattttgctaccaaaagcaaagacaataccaaaaaaaaaaacctaccaataaagaccaactcctttttaagtatagatgtagataatccttaacaaaatgttaatcagtataatccaacggtatataaatagaattaaacacaatgaccaagtggactttattttgggaatgcaagattgattcaacatttgaaaatctgtcaatgtaatctatcaatgtaaccatattaacaggatcatgaagaaaatatatcaaatgctatagaagcatttgacaaaattcaataccatttatgattaaaactcttagaaaactaggaatagaagcaaacttcctcaactggataaagaatatttatagaaaataaacagcatcatacctgatgaaagactgaatgctttccccttatgattggaaacaaggtgacaaggatgcacacactcacaactcttattcaacaaaatattgggagttccacccagcacagtaaaacaagcggggggaaagccctgacaattggaaaaggagaaatgaaacaccttccttttcgcctgtgacgtgatcatctgtttagaaaatcctaagtaatctacaaaaaatctgtggaactaataatgtagcaggatcacaagatacatttaaaaagcaattgaatttctctacactagcaatgaacgtgtgaaaaccataattaaaagtgaaatactatttggaattgctaaaaaaaaagtgaaatacctagatatcagtctaacaagacatgcataggacttgttggatgaaaactattaaatgttgatgaaagaaatcaaagacccaaatgaatggaaagacatactgtgctcatagattggaagactcagcatgttataaatgactattttcctaaaatagatgtaatacaagtttaacaaaatttcagcaggttctttttgtaaatatagacaaaatttttctacgatttatatgaaaagacagaagaaccagagtagctagtttttcatacagttttgaaaaagataaggtgggaggaaacactctatactcaatttcgacttataaagatagcataatcaagacagtgtagtattggcagacagatagacacataggtcagtggaacagactagaaacccagaaatagctccacacaagtaaagccaattgattttgacagacgtacaaaagagactcagtggaggaaagtggcctgttcaaatggtactggcacagttggatagccataggcaacaaaataaaccttgacctaaaccttgtgcaaaaattaactgcaagtggatcatagattctaaatgtaaaccctacaaccataaaacttaaaacatggaaaaaaaaatctctgggacatttgtgattcatttgtatcatggaatcctactcagcaataagaagggaatgtgatgtatatgcaactaatcagaactcttaaagacattatgctgagtgaagaaaagtcagctcgaaaagtcacatatgtatgactgcatttatagaacattcttgaaatgacaaaattatagacatggaggacaaataacagattagttgttgccagggattagggatggggttatgggaacagagagggaagtgaatgtgactataaagcaggtagtctttgtggcgatggaacagttttgtatcttgattgtgattggtggtagtgacacaaatctgcacctgtgataaagcgatacatagctatacacacacactgtactaatgtcagtttcctagttttgattttatattatagtaagatgtaaccatgggagaaactgggtgcagggtacaggggacctcttttgctatctttggaacttcctttgaatctaaaattatttcaaaattaaaaaaaaatttttttaaattatcctagctaaagcatcaagtgaaagttcttaagagaaaaaaagaaaacaagggaagggaaggtacaggatgtctgggaaattgtctgtgacatttaaactggtttttgcccagggggcatttgccaaatctggtttcctttcctcagcatcagagagcattgaggaacctgaggaaataataaggtctttctttctgggatgatgaatctgatacgttcttcctcttcaccttaaagctgagactcagctaaactggaaaccaccaccaatcccaccatccttcaagattgcagggaaagttgattttctgcatgcttcttagtttttaatgtgcatcagaatcacatggaggacttgttaaaacaaagattgctgggcaacatccccagagtgtaagattcagtaggtctggggtgagacttttaaaatttgtacctctaataagtttccagatgatagtgattttgctggtcgggaaccacactgcaaaaattatttgtatagctaaaaccttgtcggagtgaatatgggggcaagatcactgctgagaattttaagcaaccagctgacccttgtataatttgcagtgcgaatttaacgctgtgtaggtgatctaaaaaaaaaacagaaaaagaattccctaagataatttatccccataatggcagtatacatagactggcagtgagtatccccagactcttgtagaagctaacagaaattctctttggagaaactcatctccatcccagagttgaaagttttcctagaaataaaattctaagtaagtagaacaactgtgatagtcaaaaagaaaaacataaagaaactaagcactgtgagcaggactcaacagcagacctgctggaaaataggaataggcagctacagaatatgaagtaagtgtttcatatgtttcaacaaaagttgaaaatatgttccaagattcagaaactataaagactattcaaagagattttttaaaaatagctagaatttatacaattgaaaattatagtagttgaaactttattaaaagtcctcaatagggctgggcgtggtggctcacgcctgtaatcccagcactttgggaggccgaggtgggcggatcacgaggtcaggagatcaagaccatcctggctaacacggcgaaaccccatctctactaaaaatacaaaaaattagccgggtgtagtggcgggtgcctgtagtcccagcagctcgggaggctgaggcaggagaatggcgtgaacccaggaggcggagcttgcagtgagccgagattgcgccactgcactccagcctgggtgacagagccagattccgtctcaaaaaaaaaaaaaaaaatcctcaatagatgaatttaactgcagattatataaactcaaaaaaggaaataatgaactgaataattactcaacaagcattcaagagaaacagttgaaaagtacgaaagagaagttatacatatttaaaaataaatatttatctgaatggttttctgtaagagagaatggtaaacaacagttaaaagaataatggctaagaattttctgcatcttgtgaacaacactaaactatacattgaagaagcacaggaacctaaggtggttaaataaataaatcctcacttagccttgttacaataaaacagcagaacatcaaagacaaagaaaagatctttgatatatctggggaggaagacagatttaccgtgaataaggtcacacccagaagacaggggaacattttcttaaattaaaataaaaatctagaattttatactaagagaataaatccagggaaattcatacgtttcttgcagacaaaaactgagcatttgcaattaggaagtcttcacttgaaatttagaagtgtgtactctaggcatgaagaaagtgactctcagacaggaggccagagatacaagaaagatcaaaaagcataagagtaataaatatcttagtaaatctaaacaaacatttttataaaacagtaatcattttcataggctttaaagcatattaatatatatgtcaatgatagcacgtaagtcagaaggatgaatggagtttctgtaaggtacttgtgaggacagtaaagacacataacttttcagagtctaaagttaatcagtatgtgtgtcataatagcagatagaagaaatagaggtaataacttgtgaaataacatagaggatgaaataagggaaaatatgaaatccaaaaggagaaaaacccagaaacacatagttcacagattaagtagaaaacaacgtgatggatataaatccaaatatatcattaactacattaaatgtaagatgaattaagccccaattagtttgagtggcctactgaatttttaaaatccaactatgtggcctggcatgatggctcacacctatagtcccagaacttcaggaggccgaggcaggtggatcacttgaggtcaagagttcaagaccagcctggccaacatggtgaaaccccgtcttcactaaaaatacaaaaattagctggttctaatggcatgtgcctgtaatcccagctgcttgggaagctgaggcaggagaatcgtttcaacctgggaggtggaggttgcagtgagctgaatttgcaccactacactccagcctgggtgacagagtgagactccgtctcaaaaaaaaaaaaaaaaaaaaaaaaaaaaaaaaaaaaaaatccaactacgtagtttaccaaaaaaaaaaaaaaaaaaagtttaaaatggttgaaagtaaaaggatggaaaaaagatatatcgtgcaaatactaatataggttttaaaggcaaaaatcggattgttttttgcactgataaaaggtaacacttcgatgggaaaatacgattgtaaattccacatatttaatgctgtgactacaaagtatataatgcaaacaaaataccaggaggaaaaagacattcataatcacagttggagggtttttaggcttgtctcattaactgatagaacaagcagagaatacactgacataaaccttgttttacaagtattctttaatctgtttcacatctgtaacatctgtagtcacatcctgtttttcaccactcataattggttttctgtgccttctttgtttttgtttagtcttgcaaacaccaaatagtaaatgccgctatctttatggtttgctaagaataatcagtgataagtgaacataccagagagttcatcatttttgtttgtgttttgagacagggtctcgctcttttacctatgctggagtgcggtggcatgatccaggctcatgcagccttgacctctcgggctcaggtgatcctcccacctcagcctctgaagtgggagctgggactatagatacatgccaccacacctggctaaattttgtattttttaatagagatggagtttcaccatgttgcccaggctggtctcgaacccctgggctcaagcaatgcatccacctcggccttccaaagtggtggggttataggttacactgcacctggccatcaatcttattttttaaaatcttttaattataaaatacacgtaacataaatttattatttgtttagtacatttagaatgttgtgcatccgtcaccactgtatagttccaggacattttcatcaccccaagaggaaaccctgtatccgttacgtagtcactcctcattcccctgtcccatttccttcctggtaagcactaatctgctttttgtctctgggtttgtcttttttggatatttcatgttaattgaatcatagaatatgtacctggtttacttcacttagcataatgtcctcaaggttcatccatattgtagcaggtatcagtactttgtttctatctaccacattttgtttatccagtcattagttgatgaacctttggatgttgctaccttttggctgttgtgaatagtgctgctatgaacatgtgtatccacgtttttgtttgagtatctgttttcagttcttttggatatatacccctgactggaattgctgggtcatatggtaatctatgttttactttttgaggtacccagcaaactgtttttcatagcagttgtaccattttatatttctacccatgtgatatacaaggattctaattatccacatcgtggtcagagcttgttactttctttttgattatattagtagtcatcatagtggatatgaagtggtgccttatggttttgatttgtatttgcctcatggggtaatgatgttgaacatcttgtaacatacttattggctgttttgggtttgtcttttttgttgttgaattgtaagagttctttcctgttttggatacaagacctttgtcagatacatgagttgcaaatattttctcctcttctgtgggttgtctttccactttcttaataatgtcctctgatgtacaaaagtttttaatattggcaaagtctaattcatctggttttcttttgttgcttgtgcctttgatgtcatatctacaaaaccgttgccaaatccagggtctaaaagatttaccctcctatcttttcttctaagtgttttatagttttagttttatattaggtctttgatccattttgagttaatttttgaacatggtataggtaacaggctaatgtattctttgtgcatgttggcaatctagttgtctggcaccatttgttgaagatactgttctttccctcttgtcttgacacccttgtcagaaatcgatgaccattgatatatgggtttacttcgggactttctgttctattccattgatctgcatgtctgtccttatgccagtaccatactgtttttattactgttactgtgtagtacgttttgaagtcagaaagtatgagtcctccggctttatcttataaaaaacccgacttttggttttgctgattcttcttctgttttgcttcattaatttgtgctctcatctcatcttcattattttcttccttttactatattctttgggttgatattactgctcttttcctaattcaaattattatttattagcttattaacttttatctcttaaaaatacgcattttaagtgtgtacattttcttcagtatactgcaccagcggatccacaggttttcattttttaaattaatttatctcagttttcatttttagtagttttctgtttataatttgctgttgtaattcggatacatttagttttgccattttttaaaagcttgttacacatagttttgtaagctgtgatcattttagtgtttaagttctttgcaggtctttttctcttgtctgtgtcaagagtttcttgacagtttggggggctagccctatcagatatcgatatattataaaatgaaaataattaaacattgtgatattggtacaaaggtagaaaatagacagtggaaagaatagagtacccagaaccacccattccctgcctatttgaatactttctatgtgacagaacaccattgcagatcactaaggaaagggcttcaatgacttgtgctaggttaatcggatagacacatgaaaaaaaataaattggataccttcctcacatcgtataaaaatcagttccaggttgaataaatacctctatgtaaaagccaacaactgtataaagcttttaataacataaagagcatattatccatgattttaaggctggaaagattcttaatcaagacacagaaagcatgaaaaggattgatcggttcagctacattgttttggaactcatctttgccagaaatctttataaggggagtgagacagcaagcctccaactagagaagatatttgcaacacataattgagaaaggactgttacaaattaaccgggtttggcagcatgcacctgtaatcccactttcttgggaggctgaggcaccagaatcacttgaacctgggagatgtaggttgcagtgagccgagatcgtgtcactgcactccagcctgggctacaaagtgagactctgtctaaaagaaaaaaaaagaagaaggtgtaaagaactcgaacagttgaactagaaagagacttcaaaaataggaaaactgaaaggaaagtatacagaaaagatgcccagtctccttagtatttaagagaagtgcagactaaaaccaagtgagatattagttacatttaaaagtctgtcaattccatgttggtgttacccctttggaaaattggtttttttatcacctaaaatagttgagcaggtgcttatcctatggcccagcagattaactcgtagataccctagaagttagggtaaataaccctagaaaagcataagcaaatgtgtgggggaggcatctacaagaatgttcatagcaacgttttttatcatagcctaaaattggaaacagcctaaatatccctcagtagtagattagataaactgtggtatattcatgtagtggaatatcattccataggcccaatttgtgaactacagccacacacactctcacacgcatgtatcacagttataaaatcaggtgaaagaagcaaacgcaaaaggatatgtatgccatgatttcttttatatgaagtttggtaagagccaaaaccgaaaaatatgactgggataaatacttagattgtgaagttacaaagaaaagcaaggcaatgatttccacaaactttaggataaatggtacctcttgggtgtgagaggaggagatgattatggggggaattttaagggattggtaatgggtgatggatacactggtgttcattctttttttaagtgtgtgtatatacagaatacactttgttatgtaatagtttttgtaagatgcattttttgtacatttctatgccagttatctgtaatcatgatgaagtggttgattttttttaaaggaaaataaaaataaccaaaatcgataaaaagaaaaagacctgattgattaatattatggaaacagcatcagaccagctacttttatacatgaattctatcgaggaacgtgacccactttttagagttccacttttgtatttccgtacgtctgttgcatattacccctgatcacattaatagggtctccaaattaacatgtccaaaatcagtgtttttatctttttgcttttccagtgtgtcacttgatagtctgtttgttcttggttgactgcccttagttgacttatgactgcctctgtaattaccttataatgatttcattttccttatgttctcagctgttttccacttcccttctcccccaatctcttactgctccacaggacctcatgtccttttctagggtgaaaacagccactgaacatgaattatttcagtttacctttcctaggcttgaatgcttccctgttgctttcagaataatacttatacttttaaaaaaggaaatgtattatagctatcatcactttcacactttaaagcaaataaagtttttaccacttcatactactaacattgctctctcttgtactattatacttctctaagttttcctttctaccctgatgaccgttgtgcatttcttcttccatccttgcctttcttctttctttcccctggggcgtaggggggagcttacatataggtcttccctaaggtgctgtccttagtctgcatctttcttcttactaatttgtatgtaaaatgagaatttatatgacacagtaagtatgttttctacttgggttaataatatcactacccttcctggcatgcagactgaaatttcttgagttctagcttcttcctcattgcctgtatagccagttgactagcaaatttcattgattctttccaaaacttcagaaaattttcctcattttcattgacatgaccagctttatttgccttgcttaatgtcctcagatgtggtttgccagtggtctgtgatgcaaaagtaaattcatcgtacctttttccagctttatttcctgcagtggatcctttatgaaacctgtatgcccagcaaaatggaatatttttctttgacagttgctgtttttgcctctgttctttcctctcactattcattcccttcaccatatcccccatcccttctacctcttttctccttacacaatgagtcttagaaagaaagatacggaagtgaaaattaccttttttcaggccagattcttagcctcaaagatatctgtagcatttcatttgtatcttttctgacccttgtttctgccttgctttaagatgaactttgagtgttttatttctactaactagtttctctatttcttgggatcagggagtcatctttgtgtcccagactcagaagaggaaatcatatactgttcatgtgaattaatggggaacaaatacaaagaaaaaaaccacattttctttttattagcctctattttgggggtggggggtgggaagtgggtaggggtttctaaaatcattaaattttagttaagagcgatcttaccactaatttattccaagaccatagttttatgaacaagaaaaatgtgcctccaaaatttaagtggattccactgtatcacactgctcacgtaatttgtgatttccaaaattttattagttttttttttttttttttttgagatggagtttcactcttgttgcccaggctggagtgcaatggcgtgatcttggctcactgcaacctccacctcccgggttcaaacaattctcctgcctcagcctcctgagtagctgggattacaggcgcctgccaccacgcccagctgatttttgtatttttagtatggacagggtttcaccatgttggccaggctggtctcgaactcctgacttcatgatccgcccacttcggcctcccaaagggttgggattacaggcgtgaaccgccacacctagcgtggtatttattttttagaaatggggcctcgctgtgttgcccagactggagtgcagtagctattcactggcctgaacataatgcactgcagccttgaactcttggcgtctagccatcctcacgcctcagcctcctgagtactgaaaattttaaggtcattttgccttcagtcccacatgggagcaggagtcctaggtgagctggggttgccataaccataattgaatgtgagtcccctggcagaaaggtaacctccttttctttatatgcgctcatagaaattcatttatctattcctatttctcttttctccccacctttggctttggtagctggagctggcaagaaatctttcttattttctgtaatgtgttttataaattatgtgtggtctaatgattatatggttgtaagaaaaataccataaaggaagagtgtttgtccttagttttcatctttagttatccataaaatctgaactctaccctgaaaaatttgtcgtcattgtatttttcatctttcctcgatatctacttgttagttcaatactatcttttatcaattttaatgtactgttccaaagaacatatttgttactgttttcatagggaattgagcagtaggacgtttttcttacagaattaaacttacatttttctccatccactagatggctcaagtgcaccactttggcagctcagattgatccttgcttgctttgcttgtagtttctactttgagtactgtttgctttttaaaaactggatgagcccttacctgaacctagctttacatatatgtgatggcagatttcctcgcattttctgattatttacagacttctgaaaagctggtgaagtgttcttcatatcagtagtaaaaagtgcattacagtgcttagaagattttgttttttgcttttaagttattttagactttaattcaattgccaataatctatttagatttcttcaaactaggcatgcagttaataattcatccatttcttcctgattcatagtcatttggagtcattttccagcacatggtggtacctcaggagtttttgaggcacacggggctatttgcttcagttctgtagtaatatttatttagtgtttttgtgcttggaattgtatggggcagtggagggaaataccaggatgactaaagaggatattttcatcagcagggagctcactgcgttaattcgtttccttaagtttccttttttattattttttatttttattttccctgaaagcacacattggtatcttgagtttttgaagccaaataatgagtataatgaaatggctcattagagcttatgtttgtaaccaaccctgaggagaattttgtttttgacattgaccctgttgatattgcctgaaaaaatttaaaaaaaaaaactgaattctttagaaatattttatgcttatggctttctgttttgagttaagtaaaaaggaaaaggaattaagatttgttgaatgcttatcatgtgccagtttcttacttaatttgatgctctcaataatttggaagacaagtacaaatatctctatttacagatgaagaaactaaggaatcagaagttgcctaggatcaaagaaacagtaagttagagaggcaaactctttgtgatatcaagggttgttttttatttttttgcccaagagaaaataattattttctgaaatggcagaaacatttgtaatatcaactagttggatactttcatatcctaaagacagaaaactccaaacaaaggattgattgcctctcacagttgatctttgagattataaacaaatattcttgccaagctagagcaatcagtcatactggtatctcttttacagatacctttagaatgacagcaaacactataaaattgatttttccagagaaagtgtttgcacctaataatcttatttttcaggaataataactgaattatttcatcagtttgaaaatatagtgtacgatttaaaggagaatggcaagttattgatgtaaatacacattatttacaatattataactagattacattacaaatattgtaacaacaatttgtctttataaaatccccttgatttctctttattgtttaagagtccttgcagctaagccgtgtaaaacaggaaatatggctgtttgccagtgttcttaaggaagcaggagtgaagtaaagcaaacaatacaaaaggggtttgtttaaaggatgtacttaatttctgtgtggctgtggtatcatttttctggctctgttgtctttgtcctttttcactgcaaagttgaaattgtactttcacaactattaaaacaaaaataaccagtaatgcgaactgaacccaaagatatctaagataaatatcctcccatgactgtaaatttgtatcctccatatcaccttagaaattttcgtatgcattgactagatttattgctatttttgttctttttttatgtattatcagatattgccgtcagtactattaccgcatttacacaatgttgccttgtgtggaaattctaaacctttgctaactcttggtaaccaaaataacgataaactaaagagattattatcccatcttttgagagaaatgtaaaattattcatttgtctataaagaatctttgacaaaagtattttttaaagcatattgaatcctagccattttattattattagctgtgtacctaaatgatattttagatatgagtataaggaagacaaactttaggttgtcaaagaatgagcatgtctcatgtgttacagtcatggcatgacagttggattacaattatctcttgatgaatcaacttcatctaaaccttaattgcatattaaattatttagtcatttcctgattcagtaatgagaagtcagaatatatagtaatttactgggtagcatgttacatgccatagtttgcggaatgtacttgatcagtaaagtccacagtaaatcaaagacaaatgagaaaattcttttagaattcagttttttttttcttaatttgaagtcactttaaatgctcttatgtaataagaaaagaaccctaggtatatttaaatacttaacctgctataactttttgttggaaaggaggtagattttttttatgagtatttttttcctatgggaaaaaaaataactttggtgatgcagtatgcctttatctgtgtattgttaaaaactaaactaaacaaaaaaaacccctaagaacctttaaacttaacaaagtttatttgagcaggaaaaaggttctagaagcagacagcactctaagatggttcagaatactaccacttacaactggtgagctgttctaataacagggaaaaataggaaatgtcatacagaaattacctgattggtgcaggttggtgtttgccttatttgggcataatctagcagcttttaacctgggattggctgagactcagatgtgtggttataagggtatactcctaagttaggttataacttgtttacacatcaagctagagtacagttaatagtgtatggaggcagctttgggccaaatctgattgaacagtataaaaataagttttgcaaatatttatccttaccacatgagttacatcctaatattctttattctcttctatttcactaaaaaaaattcaaatccaccaaattcatttcatggcccatcggtgtgttggagctcattagtttggaaaacactgccatatagggttgaaaaattttttttctttttttaccctgttaacaactgactagtctgaaggagctcaaatatttggaaagctttattagtgcagtttagtagctggcttttaaaaaaaaaaaattgctttctagaatcctccctgctacataatcaccaaatgttatttcaatattgttttcctaacttgaaaatttaactgaatgactagaaggtgttggaccaagaaatatctgaagtaccaagcccacaaaggaaaatttaatattgattgaggtatcatggttatttgtgcacccttaaaattaagccaattttagttaatagaagtttcagctgggtgtagtagcgcagcactttgggaggccaaggcaggaggatcacttgaggccaagagtttgagaccagcctgggcaacagaatgagaccccatctatacaattttaaaattaagcaagcttggtggtacacgcctgtagtcctagctattcaggaggctgagatgggaggattgcttaagcccaggagtttggggctgcaagtgagccatgcttgtgccgttgcattccagcctgggtggcagagtgagatcttgtttaaaaattaaaaataaataaataaataaataaataaatacatatatatgtttacatatatatataaatttcaagttaattgtttaaaggatgtcattaaccaaaactaagcatcagtctttggtaatgaaagcattctaaaagtctttcttttagatagattgaaaagtctatcttgcagacaaagataattttattaatcataagtaacattattatgaaaagtatttgtgaatattaataactcagtttcttcacttatgttgagttgctttacatgttttatctttgcataatctgtaaacttgatgtttcgtagttgacagaataagtttacagttagatatataggtaacttttagttcaatgttttaaaaattgtgtcatgagaagtataaataaaattcaacgaaagataccatttcttggccttatataatggcatatatttgaacacttggagatagtggaaaagggcatttcacataaggggacagaggcatcaaggcagaaaagcttaatatggtccaggaataaaacattcaactggatgggctttgttctaaaggcagtttttgagagaagagagaattaaattaacttatattacaatacctacttgctacaggagataatgggtggatttgaagggagtgaaattaggcagagagagtagttaagaaatcattgaaatattttagagaagaaatgagattgaagtaggacagtgtctaaggaaataaaaagtaatttatcaagacagtaaaatcaacacaatttggcagctgattagattaattcaaaaatatttgagtgtgtgctatgcaattctgggaatccaactgtgaacaaaatgcatgctctttacccttacatgtgttttagtccaatgggaagcacagacatttcaattcagggtaatacatgtgctgccatggagaaagactcagtgttgtcttgggagtgagtatactgactgaacttgaagcctcagggatgagtaggtcttgaccaggtaaagttggggttagagtgtgttacagattcctccctgtcctctccccgcatgttggcttggaggtgaaaagattgtggtacttttaaagcagttaattgtggctggatcctgggattggagagggaggaggatctggtaagagagggccagggccaaatcatccagagtcctgaagttcctggaatcccctagttcttggtccacaaccctaatgaagccttggattttatcttaggaacagaaattaactgtggtatgattttaagcaagggagattcagggtcaaaattgcatgttagaagaattattttagctaagaatgtcttagttataagtcagaaacttaagcaaaagacaaagaaagtgacccagaggattcagcatatgcagaggtaggaagtgcggctggacttcacaaagatttggaaccagacatggttcagtatcagatgcgtcctcttctgttgtatcgcatagtgtcttgtctctcatgtctgcttcattgctctgtgtatactgtcttctcttaactatacagctctaacttaacagcctctgaatttctctcccactttcaagtcctctggagagagtctgactggttccttgtcagttgtctacccttggtttaatcagctgtgctaagagggcagggtcatgtagcataaacatggtgcttcaaagccaacccctctcacagttaaggggtatggtgagttgtgggctaggcagaattcttagaaagaaccaacttcagaagatcattttggctgcagaatgaagaattcaggggaagggaactaaaggaaggggacctctttaagagaatacagtaatccaggcagtaggtaatactgccctgaatcaggggtaagtaagaagagaactgatctgtggtagattaaaggttgaatctccagaagtgtatgtagattggatattggagtataaagagtcaaggatagtgtttgtgtttctggcttgaatacctgaatggatgatgatagcaatccctgagctgaagtagcatcgcagcaaatttagtggggattgaagacgaagaatttatttttgtgcacgtgcagagtttgagatagcctcaagacatctaagtggtaatgattagtagacccttgaatatatgcatctatagcagagggaaaagctcaatagtagatacatatttgaaattctttagtgttaagtgataactagagccatgagggtagatgaaattgccatgggagagtgtaacaagacaagagggccaagacagccatgaagagaatctgagggctagcagaggggggaaaatgagcctacagggcagactgggaaggaacagaaaggtgtgagaaaaatccagagtatgcagtgtttttagaaacccaagaaaagtgcttcaggcaggagaatgtggtgaaagtgtcaggtgctgatgagcagcataggaaaaagtcaagttctgtttaggagcaagaagtttgttgatgaccttggtgaatgagcttaatgggattggtgaatatgggaaacaggattgaggactctggcaagtgaagaaatcaaaataaatataaacagtgcttgagctataaggagaaagagtgggtagagatgattatgacagcgaagtaaggtttttatgtattttttaaaatatcagggtcttgatcatatttcagtgctaggagaaagagtgataatcagttgagcaagatcaggagattcttcagggcactattacattgtaatggtgaagagtgaagcaaaagtatgtggaaactagtttagtgaatggaagaagaggtattccctgactttcattttctctaggaagaggttgggattatttacaaataaggtaaagtcgaagacttagggaacaggaggacagtttgtaatagatactgtagaaattagactagtgcaacttgggattttttttttcactagcttaattagaggtcttaaattgaaagcagcaccagtatacatcattgtattggttttgttcagcagtctgattacatgcttatgttgtgctacttcaggttggtacattgagagtaagatattgacatgatggtggtctgactaatggaacatggaatataagctgtggaaggaaagaagtaaaagtgaggactaatagaaaagtgagttgttaaaggcctagaggtcttatgtgcaaagaataagtgacagtaactcagcttgagaggcaggtcctaaaatgagggtaacactaaaggggaatggaccaatagcgtcttaggagattttcctgcatttgcctgcattgctggaagaatggtattgctgataaaagaagtaaacatggaaggaagagcaagttagttttagagggaagaaaagttagatttttactgtttcccctttgagtacctatggatcattcatactgagatgaccaagaggcagttgaaaatataagggagaagccagggctggaaacaaaattgggagattataattgaacccataaatttacaaagaatataaagtggtaaggtctacttagacgctatgtacatttaaggagtaagaaatagagaaaagatgcttacaagctttgagaatttgtgaagaaactcaaaagaggttgaaagggttgaccaagcagatcaccggatttgtgagtggctttccagagggtttagtggagcatgaaaggagattggaaaggtttgaagagtaactgactttctgagagtatgtatattgccaatgaatgatgtattattatatgtgatttttaaaatctccccaatatactgatatttttaaaataactttaatttgcttttttattaaaaaaattattagctatagtctggctttctgaaatagagtatactggtcatttaatttgttaatgcctcaggagtatcatagttatcgattattactcagagctataatatggttgggccctttcaagtgctgttaagaccatttgtttttgtactgaatgccttcagtgtgttgtgtttttcaaggccttctttcccttgtcatttgttgcattaagtcatttgacagtattattcaaggatttttttccccctcgaagcactttactgtgttatagtttataattattggaagcctctgtagatatatctgaggatatgggggttggtggggagtagtatctcctactataatcatacaagacagaatacttctgtggcctctggtcaccaaaatgtatgaagatttctctccaacagacaccaactgggtgtcttctgattcaattctattctgacattgtcttccggaaaacagcatcagatcccacaggatgaggtctcagtcccacaacactgcccccctacttcagatgccagtcacaggcataagttgtagccttgtgtctgactgaatagctataaattggggttcccatgatccgctccttgggttcgattaattttctagagtggctcacagaactcacagaaatacttacatttatccacttattataaaggatattacagagaatacagatgaacagctagatgaacagacaagatgcataacacaaggcgtggagaaggggcatggagttttcatgccttctccagctatgccacgctctgggaacctgcatgtgttaatgttatccagaagcccacaaaacagtcctttagaatttttatggaaacttgtttacttaggaatgattgattaaatcattggccattggtttatcgactcaaccttcagctcctctccccttcctagaggttggagtaggaccgaaagtttcaaccctctaattatgattacaaacagaaaggaatagtaccaacatcaaagaccaaaggtagataagtccatgaagatggggagaaaccagcgcaaaaagtctgaaaattccaaaaaccagaacacctcttctcctccaaaggatcacaactcctcaccagcaaggcaacaaaactggatggagaatgagtttgacggattgacagaagtaggcttcagaaggtgggtactaacaaactcctccaagctaaaggagcatattctaacccaatgtaaggaagctaagaacctggaaaaaaggttagacaaattgctaactagaataacccgcttagagaagaatttaaatgacctgatggaactgaaaaacacagcacgagaactttgtgaagcatacacaagtatcaatagctgaatcgatcaagtggaagaaaggatatcagagattgaagattaactcaatgaaataaagtaagaagaccagattagagagaaaaaaaaaaagagtgaaaagaaacaaataaagcctccaagaaatatggaactatgtgaaaagaccaaatctacgtttgattggtgtacctgaaagtgaccgggagaatggaaccaagttggaaaacactcttcaggatattatccaggagaagttccccaacctagcaaggcaggccagcaacattcaaattcaggaaaatacggagaacaccacaaagatattcctcgagaagagcagccccaagacacataattgccaattcatcaaggttgaaatgaaggaaaaaatcttaagggcagccagagagaaaggtcgggttacccacaaagggaagcccatcagactaacagtgaatctctttggcagaaaccctacaagccagaatagagtgggggctaatattcaacattcttaaagaaaagaattttcaatcgagaatttcatatccagccaaactaagcttaataaactaaggataaataaaatcctttacagacaagcaactgctgagagattttgtcaccaccaggcctgccttataggagctcctgaaggaagcactaaacatggaaaggaacaactggtactagccactgcaaaaacataccaaattgtaaagaccatcaatgctatgaagaaactgcatcaactaatgggcaaaataaccagctagcatcataatgacaggatcaatttcacacataacaatattaaccttaagggtaaacagactaaatgcctccattaaaagacacagactcacagactggcaaattcgttaaagagtcaagacctatcagtgtgctatattcaggagacccatttcacgtgcaaagacacacataagctcaaaataaaggggtggaggaagatttaccaagtaaattgaaagcaaaaaaaaaaaaaaaaaaaaaaaaaaagccagggttgcaatcctagtctctgataaaagagactttagatcaaaagagacaaagaagggcattacataatgggaaagagatgaatgaaacatgaagagctaactatcctaaatatatatgcacctaatacagtagcacccagattcataaagcaagttcttaaagacctagaggcagactcccacacaataatagtgagagactttaacaccccactgtcaatattagatagatcaacgagacagaaaattaacaacgatatccaggagttgaactcagctctggaccaagcagacctaatagacgcctacagaactctccaccccaaatcaacagaatatacgttctcctcagcaccacatcgcacttatactaaaattgaccacataagtggaggtaaaacactcctcagtaaatgcaagagaacagaaatcataacagtctctcagaccacagtgcagtcaaattagagctcaggattaagaaactcactcaaaaacgcacaactacatggaaactgagcaacctgctcctgaatgactactggaaaaataacgaaatgaaagcagaaataaagatgttctttgaaaccagtgagaacaaagacacaatgtaggagaatctctgggacacattttaagcatgcctagaggaaaatttatagcactaaatgcccataagagaaagcaggaaagatccaaaatcgacaccctaacatcacaattaaaagaactagagaagcaagagcaaacaaattcaaaagctagcagaagacaaaaaataactaagatcagagcagaactgaaggagatagagacatgaaaaaccctaaaaaatcaatgaattcaggagctggttttttgaaaagatcaacaaaatagaccgctagccagactaataaagaagaaaagagagaagactcaaatagatacaatagaaaatgataaaggggatatcaccactgatcccacagaaataccaactaccatcagagaatactataaacacctctatgcaaataaactagaaaatctagaagaaatggagaaattcctgaacatatacaccctcccaagactaaaccaggaaaaagttgaatccctgaatagaccaataacaagttctgaaattgaggcagtacttaatagcctgctaaccaaaaaaagcccaggaccagatggattcacagttgaattctaccagaggtacaaagaggagctggtaccattccttctgaaactactccaaacaatagaaaaagagggactcctctgtaactcattttatgaggccagaatcatcctgataccaaaacctggcagagacacaataaaaaaacaaaatttcaggccaatatccctgatgaacattgatgtgaaaatcctcaataaaataccggcaaaccaaatccagcagcacatcaaaaagcttatccaccatgatcaagtctgcttcatccctgggatgcgaggctggttcaacatatgcaaatcaataaacataatccatcattataaacagaaccaatgacaaaaaccacatgattatctgaatagatgcagaaaaggcctttgacaaaattcagcagcccctcatgctaaatactctcaataaactaggtattgatggaacatatctcaaaataataagagctatttatgacaaacccacagccaatattgtactgattgggcaaaaacgggaagcattctgtttgaaaaccggcacaagacaaggatgcactctctcaccactcctattcaacatagtattggaagttctggccagggcaatcaggcaagagaaagaaataaagggtattcagttaggaaaagtggaattcaaattgtctctgtttgcagatgacatgattgtatatttaaaaaaaccccattgtctcagcccaaatcttaagctgataagcaacatcaacaaagtctcaggatacaaaatcaatgtgcaaaaatcacaaacattcctatacatcaataacagacagacagccaaatcatgagtgaactcccattcacagttgctacaaagagagtaaaataaaatacctaggtatgcaccttacaagggatgtgaaggaactcttcaaggagaactacaaaacattgctcaaggaaataagaggggacacaaacaaatggaaaaacattccatgcccatggataggaagaatcagtatcatgaaaatggccatactgcccaaaataatttgtagattcattgatatccccatcaaagtaccattgactttcttcacagaattagaagaaactactttaaatttcatatggaaccaaaatagagcccacatagccaagacaatcctaagcaaaaagaacaaaattggaggcatcatgctacctgacttcaaactatactacaaggctacagtaactaaaacagtatggtactgataccaaaacagatatatagaccaatggaacagaacagcagcctcagaaataacaccacacgtctacaaccatatgatctttgacaaacctacaaaaacaagcagtggggaaaggattccctgtttaatagatggtgttgggaaaactggctagccatatgcagaaagctgaaactggattccttccttacaccttatacaaaaattaactcaagatggattaaagacttaaatgtaagacctaaaaccataaaaatcctagaggaaaacctaggcagtaccattcaggacataggcatgggcaaagatttcatgactaaatcaccaaaagcaattgcaacaaaagccaaaattgataaatggtatctgattaaagagtttctgcacagcaaaagaaactatcatcagagtgaacaagcagcctacagaatgggagaaaatttttgcaatctatccatctgacaaagcgctaatatccagaatctacaaagaacttaaacaaatttacaagaaaaaagcaaccccatcaaaaagcaggcgaagcatatgaagagacacttctcaaaagaagacatttatgcagccaacaaacatatgaaaaaatgctcatcatcactggtcattagagaaatgcaaatcagaaaccacaatgagataccatctcactccagttagaatggcaatcattaaaaaatcaggaaacagatgctggagaaataggaacacttttgcactgttggtgggagtgtaaattagttcaaccattgtggaagacagtgtggcaattcctcaaggatctagagctagaaatactatttgacccagcaatcccattactggttacatacccaaaggattataaatcattctactataaagacacatgcacatgtatgtttattgtgtcactgtccacaatagcaatgactgggaaccaacccaaatgcccaacagtgatagactggataaagagaatgtggcacatatacatcatggaatactccacagccataaaaaggatgagttcatgtcctttgcagggacatgggtgaagctggaaaccatgattctcagcaaactaacaaaagaacagaaaaccaaacaccgcatgttgccacttctaagtgggagttgaacaatgggaacacatggacacagggaggggaacatcacacaccagggcctgtcaggggtttgggggagggatagcattaggagaaatacctaatgtagatgacgtgttgatgggtgcagcaaaccaccatggcacatgtatacctatgtaacagacctgcacattctgcacatgtaccccagaacttaaagtataatttaaaaaaaaaatacatttcttggacccgtggtagaaagactgatcactatatccagatatccactccctcactgctcttggtcaattgaacccttcaacttttagttgggtacatggctactttgcggtaagatgtgactgtggtgtgtgagccaagctaatttgcgcagaaggaattgtgtagcttgcaagtcatatcctcagaagagaagatgctcacccttgtcttctttccacccctcccctggattggagaagagatacgttattgcccaccacatgggcagtaactccctaggaggtgacagagcaacaggataaaaggaacctgggtccttggataacttcatgaaatagagttgccttttctctgtggctctcccacttaactctggactattatatgagaaataaataaactaaattgtttgaaaaataaataaaagatgaatagggagggagtgactacaaaagttgcttatcaggaattctaattggtttacagaaataacattggttaatgattttctatacattgttaaattgtaaggtgtgtggcattttatgtcttcttgaggtcagttagtctagagcttgaatagcaagtggcttcaaggggtaattatttacctcaagggagaatgaggcatgactgctgttagattttaaatacctttttgggactgataacttaggcccatattccttagataaaaagcttttcttcccccctccctccgcaacctttactccttgtggtcaaaaatctttcttctcgaaagcattgttaatcaaaatctaagtgtcatgatgtcccttgtcaccaggaagtctcactcccaggtagtgctgtcccatgttgatgagggaggaggaaatgtctcagtgaggaattttaagagttcccaaaagctgacttaggatggcatcacagagtggcagaaatgagacctcagttaagtcattgatttatgtaagtcattgcttgttgaatcatccctagtctttggaatcccatgattttagtttcctccaaagtaaaacaatgagagatacataacagttaagaatttgtattgcagaaatataatgcacacattgactacaatcaaaaagtgaatttacatgtcagaatgaaaaaagaacctattcattagggagccaacaacaaaatcttgaaaaaaattaaaacctggttcttctttacagactggttgtagccaggaaataattcaggatttagtccaagtggtagacaaataagaaaactcaaaaacaatggtcaggctagaatctaataacaggtgtgttatagttttcttatgaaacgtgatttttctgtctctagtctcccttttatttttttaaaatacataattatatatatataaaatgtatacatttatacttagaaattttttctttagtaacaatctcactctgtcactcaggctgttgtgcagtggcatgattatagctcattgcagccttgaattcctgggctcaagtgatcctccacctcagccgtgagtagctgggcttacaggcacaagccactacacccatccagtgcctcttttctaccgaagagaaatagaccaatttatttgcaaaaaaagttttagagttattatacttggcctgatttatttgcataaagtgcagcaagagtagtgattggtcatatagactagttggctttgcctgaaactttttcgttagaaattttggattagacttttggaaacttctcaagtctaagaagtcaagccagggattaaccatcagcctgtgcctgtaatactttcacagtttggtgaattcttctcttcttgaagtcccaaaatattttgatattcctgaaactctcagaaagtgacattctttacataccgcaagtcaggattcttgtaagggaacagtatagacaacttattaggtcaagtctttccaaggggctttttattggctctataaagtcaaccttaattcctcaaagtagtttgatcatatgctgttccagttaaaccttggtacaataaccagtgtctccaatgcgtcctcttacaaaacaaagaaaatattgcacttatacaaacaactatattgtcataaatgtcataaaataagaatattcacaaatagttcccaaattctggagaaaatcaggtaaagaggaaggtaaatgtttcacttttccccacaaaagtatactttacctaattgctatgagctataaatggctcaaaaaaaatgtggactctggcaaaacaaatatgagaagaatcaacaatgtttcaaacaaaaagtgattaaaaaatcatttcagtcctctatcagttcagtcccatgtaattaattcctgttctgtttcatgttggcttagcaatcttcattaacacatcagttttttattcgaattttggaaatttttacctagtccaatggtatcatctccatagttatctgaaacctgtattcaagaatacttgaatatggtacaaactcgtattcaaagtcctttccacgaatttctttgaagacacacattttaggatttggagggaaacaaagctcttaaaaaaaaaaaaaaaaaaaaacagactagatgcagtggctcacgcctgtaatcccagcactttgggaggctgaggtgagcggatcatgaggtcagtagttcgagaccagcctgaccaacatgatgaaacaccgtctttaataaaaatacaaaaattagccgggcatggtggtgcgcacctgtaatcccagctacccgggaggctgaggcaggagaatcacttgaacctgggaggcggatgttgcagtgagctgagatcatgccattgtactccaccctgggcaacagagcgagactccgtctcaaaaaaaagacatgagaataaaacagtttactgcatataccaaggcatatcagatgtttaggaattgcatacaattttggaacacatatcaatacaactgtaactcaaagaaagctgaacactatttcttgtctgacagtgctttccatgtttgaaatttgatttgggggaactgtatcagatatcaaaggtttaaaacactagatatggccgggcgtggtggctgacacctgtaatcccagcactttgggaggctgaggcaggcagatcacctgaggtcaggggttcgagaccagcctagctaacatggtgaaaccccatatctactaaaagtacaaaaaaattagccgggcgtggtggcatgcacctgaatgtgagctacttgggaggctgaggcaagagaatcacttgaacccaggaggaggaggttgcagtgagccaagatcacgccagtgcgctccagcatgggcgacagagcagggctcccatctaaaaaaaataaataaataaatgtaaattaaacagatatcaagataagaaaggtttgaaatgctcagtgttaaaataggatcacaggtcattgtaaaacagtcatttaaacaaagtgataagtcagtgatttttaaaaagtcaaaacctgtgctctttgattagcaggagactccatcaaagagtaagtttgaggagactgtatcaaagagtaagactccatcaaagactcacttttccaaataagacctaataaaggcagcatgagctcaagaaaatctctctctccctccttttcttttgtagtttactcaaaagtaaacaaaaccttttactatctcctgttaacactacctgaaaatcttgttcaaaagagaaaacgaaatcctacctttgtatcagtatattattaatattaaacctaattttaataaaatcttacaataaacagatccatctgatcccagtcagctttgaccagataagattttcatgaatcttttataaactcttacaattttattttttctttctccaactttttagttttagctatatcatgtaaattttgaaacaatctttaacctctaaactaggcaaaattacttttcctttagcaaaactcacaccctcctctcttttttataactttcttcaccaaaaacacatcctactttcattgtatactttgcatacaagagtgtttcccatgtatctagtacttttaattacatatattaactacgattttaactcttagtagttctaatttcaagtgaaaaacctagaaagtaagtagtagttaactggtttatgtctgtatttgtagacaaatcatttcatggtttcgtagaaagatatttctataaaatataattgatgcctacttttttgtttattaacagatctaaagattattaacagatctaaatatatttagcttttttataccatgtaaaaacaaaataccaaattatgtaaactaaactaaaacatatctaataattaatgtttttgtatcttaatgtatgtagaaatgactcaaacattttatgattatctattactttattaaacctaacatgacttcaaaactttaaactactgaaaagaattttgaaactgcaacacagatacccttcctaatgtcttcctcagtcatactgagtcgcaactacccacgtggcacccaagtatgattatgaaggggcagggcctatctgagtcctgattttacacacccataatggagcccaggacagaggacagaactgtgaagataatgtctgactcttcccaccatagccaggagacaacagccaggccagagggagtaccacatatgtctgcagtcctcacttgttagagcccagaatctaatgagtctaatacataagctcacagacaagtcaaataagcatcaaacatatcacagaagcaatagttttatgagcttcagacatctagtagagaaagcctaaacctttctgaccagcagacccaggcaaaaatgtctgattgtgtttaaaactgacaagtctgaagacattctaattttattttaccaacaattaaaaagctaattttatttctcaaagattactaaaatcacattaacttgaaaaatatttgggattattaagctatgagcattaatttgtcagtttggtaccatgtaaacaatatacaaacagatctgtacacatatatacataaaaatacaaacataagtgaagatttcatagctttgatataaaaattctagccatgagacaagtaaaactcgctattttaaaaggacattggattcaaagttcataaatagaacaagttcaagtttattgtatatgcctgaagcccttaccaagttttaaataacaagtagcaaatttatatttcaagcacagagaatttaagctttccaaaaggccaattcaattttacgttatctttggcaaaaatcatgttaacagaatccaaaagagtaaaacataaaggcctttcttctacaaaaaaaaaatattttatatattttttatatattatatatctttatatatacttatatataatatatattatatatatgactcaggctagctatatatatacagctgtgtgtatatatacatatatacacattcaggctagctatgtgtatatatatagctatgtgtatatatatatatgtatatatatatagctatgtgtatatatatatgtatatatatatagatagcctgaatgtcagcttttaattaagctaatttctggctatagacctctttcaaagaaaaaaaaatattttcaagtttcttaacagattttagctggaataaacagccaatattcctggcttttgactttttttttctttttaaccaagggtacctttccaagtgactcaccaaaaccaataagccttaagaaaaatttttatgacttgaccaaggatgcacaagccatctccaaagaggtgcaaagcaagccctcacaagatccagaaccaccccaaagacagtttaaataatgaaagtcttggtagccacaaataaggtgcaaatccacatttttgcttgactgtactctctagggtttcagctgatggcagacagaagaagacaggaaatcaaaagctgttcatggaagggaaaaggatcagtaacaaatgggtaccctaaagggtcaagagtcatattaatattgtaataattgaaaatattcaaattcttgtaaatgtttctctcctaagctaaagatattaaccaaagaaaggaattttttgttgttctaaagaattttaactctgttttagatcttatctcagctggaatgctgcttggctaattccctgcatgttaacatttcaaacacatgataagatttatctctccaaggtactgtgaactccagctgggcattaaaggatatcatcagtgccattcattagtcctggttttgaaaaaaaaaagttgttagatctgtatttttataatctcagtagtttcattctcattttttagttgcactgtttgctccttttgttccaaatttaaatacatttctctcttttagactattaattttccagttacccattttattgccctaagtagttgttaggttcttctaaagggatgacacttaacatgaaatatgtagaaaaaatatataactcaaaagtccagagctgaaatccaaggaagaaggatgtaggtaaaagccagttaagacaagatggcctggcccagtgccgtggctcatgcctgcaatcccagcactttgggaggccaaggcaggtggatcacttgaggtcagtgagactagcctggccaacatgatgagatcccgtctctactaaaaatacaaaaattagccaggtgtggtagcgggcacctgtaatcccagctgcgtgggagggtgaggcagaagaatcgcttgagccggagagtcagaggttgcagtgagccgagatcacgctagtgcactccagcctgggcgacagagcgagacagtctcaaaaaataaaaagacaagatggcctgaaaagcaccttcaccaaagacttatgtaaatgtaagccaatggtaagtttctagtgactcagcactccctctccaggtacagtgaggtaaagacccttacaaatgaagatttcttttgtagatgtaaatttcttttataaatagccaactaaatgacagaaagctgtattttggacactgattttgttgaatgggtggtctttttatgttcacttttgttagcttaaaaattactgagttcagctgggaaagcccattaagaaaaagggcaaaaaaagcataatatatgtgtggactcagcatggatagctctgataaagaagcaagcctgaagggttacccctaggttaaagacctcttctaaaaaagaagggtttgaaagaacagcccaaataaaatgtacaccttcaaccaaagagtggtataggtccagattattagtaggacttttgtccaataatttatcttggaattggaagaacatgagagtttcatagttggccaggtgccaagtccaggaatggctaagggtggcttactgtgaatcctgctcacagtgccagaaatgtcaacctaaagggaagaaaatgaggcatagttaatacagataatgtatttgggccaaggttgaggactgcagcctaggacacacttccaagtggtcttggggagtgctccagagaacagaagagaggctcatatttttagagaaaaaaaggatgaatcaggaaagggattgattgcaaaaaggtattcatcaggaattcttgttggtttacagaaataacattggttatttattgtctatacattgttgaactatagtgtatatggcattttatgactacttggggtcagttagtctagagcttccatagcatgtggcttcaagaggtaattatttagctcaaggggtagtgagacatgactactgtacatttaaaatgcctctctgggcctgataatttaaaggggctcgaattccatagagcaaaagttttttttgttttgtttttcataaccctcatgtttagttaacattgctgacattcatgaatcaaaaaacccaaaccacaaaaaaacaagctatttttattatcacttctgctacctagcatgtcaggcagtcatgttatgtttaaattgccttcaaatggtttcaggaacttttcccatatgtatgttattgaaccactccagaaaatcgtaaatcccttttgtagaggaagagatgattagacgagaaatacttagtgtctggcacagatttatacagaaaaaaatttttgtttttagtttctggtctttgttgttactttgttggtagtaaaaaatgagttttttttttaattagccaggctttaggccttatccagtgaaggacaacttgaagatgagatagagcataaaattcaagctatttctagagattgatacaggttcattagctggacaattaaactttttacttgtcttgcaagtcttcaacttagatttgtcatatttggttatcataatcaaatggaaatagtagtttttgccccatcttgctgagcttttagattttgagatcatttgtaacatactctgaaattcagtgaattttatttttttctgctgggggcaggcacatttaattacagaaagccatttgccatggaatctttttttctaaaaactacctagcgttaaaaaaaaatctgatcataattacgttgctagcaagataaactagcaataagtatatgtggtatcaactaatatgaaaaaaattatctgtaaaatgcatctgggacacttctcatttgctattcttaatttgcagttttaggaattgtctcgtggtggttgaatgtgatcagcattttcttttatgagcctgggagtcttattagtgaaagatttggcaaaagttagaagaaaatgtcaggcattcgggtcttctcaaggaatgagatttttcagtatgtaaccaatttttttggataggcaaagatttaacccaagtagtacactgtacaaaggtgcctttaaaactcagcattctttcttgtgtaaaacctcataaaaattttatggaaatttatgggtatcaatttttcttagatttaaaattaaaatagcttttgagtaccttgggaaatagtatattcttacaaagtagatgacctatttattcagttgaatgtccttgtgaaaattgacgttgctttactgacactaataatctacatgcagttgagcaagcccagaagccaactttggaatattttgaaatgtttaccattttgagtacaaagtaattttagaatcttggataccagctcactgaagtgttatggtaatatcatacccatatcatttccgttacttatatttgttattgtttaaacagtagccaaaaatggccaggcacggtggctcacatctgtaatcccattactttcggaggccaaggcaggaggattgcttgagaccaaggagttcaaggccagtgggccatatagcaagacctcatctccattgaaatatatatattttaaagtagccagaaacatgtacttactttactgccaaggatatggctgtaaagtcttgagatctttaataaataacttgaatgtctgaatgacttggaaacaagttctgaattagcttactgatttcatgtgtctggcgctatttagctaaatccaccctcctcaaaatgtagaaattgttaagggacagtttcttgttgagacagtttctgtcttagcatcattttgtggttagaatgtagtaaacctactcaaataagcccaattaagaattaaatctattttatgaataggtctttaaaaacccaattgcagaactacaaaccaggcctctttctcccctttgtgggtgggggtcagattctcctagaagagagggcaaactaggtatgattagtatacctgctagaaagaacagttaagtggccagggcaaacaaagttgtctcttggctgtaataatttttttctggactcatgggcaactaaagaaacatgctaattatactgatgcttaaaggatttgccctctattacggagggtctgtgggagtagaactgtaacctcttctttataagcgagtagtacagaaaagggagaaggagaaagaagaatcctaaatatggaggggaatcatctggaaagagctcagattaatttttataaaattgtgtaagattttataagattatatatttttataagattataacctcttcctggaagcctcatttttaaactgcttatggtagtgacattttattatacatgaatttaacttttgaatatccagctgtacctgtcttgacagataaaatgacagtttcagtagtacagacaattctgcccatcctaggaagcttatgcccttgcagatgagaatctgctgttctctcttagtttgtacatgtctcccgtcagatgagcatgtcatatgtagtgtaaatactttaaataaaatcatggccctgaatgttattgtactaaatgttacattatgatttaaggagattttcggggtaattttgactatgtcagttttgtggattatttggaagagtggaattttgtgcactctgggctcgagtctaaagttagtgtgtaaagccaaagtcagaatcacccttgaaagttcctcaactcataaaagccaatatgaaatcttttgtgtacatatacactcttgagcattaattcttacacacatttaaattggagagtgactaagctagactgaaaggcaaaaggaaagtatacaggtgttgtatattcattcagctttaaacatggtataggtagggaattctaaaatgttccttcttgcctgccagctttacttcattttgttttaataataaactctagaatcttaattcttactaatcgtgtatttgttgtgggaatttcaggagctcgttagcctcacctttctgtgagatagcttctgaaatcagttggctaaattctaaggttagccattaagtaggtttatgataaaactttgttttattgtagttttcattatttcccttttcttttgctttagtattttagtaacatcacttttaagatgttactcatctcaaaggaggcaaaggaagagatttggtatcaagtccttcattcaactaaagtagaaagagagggaagtagtatgcccctctaggctggtggttgctgtgggaatcaatgtaaaaacccctttaagaggataaaaatgggacagttaactggaaacttaccaatgagacattctctttctagagctttttcttttctagcatgttccccccagttttaagaagataacccacactcttatctgtttcttcagtatataatctcaattgtgagattacaaaataatttctctttaataatatgcccaggtgagaatgggagtaaaattctggttttctttatttggtgctagtgtcagcagtgactgaaacataggctgtctcagtctgggccctgtagtacaatgctcagacctaggctggcttactcttcatatggctctactaccttagtatagaggaggaaccgtaaagtccaagattgggcacttcattcacaccacttagtaggcagtctcctaaggaaagaagaaaagtgtatgtccggagagacataaatggctagtcagccatagttttttggggggaaaggaggaaggggagagtaccctaggatgcaccctatatttcacatattgtttctactacttttggttaaattgtagacaagtctgttgttggaataggccttcttagtgcaggacatagtggtatttctgtattaattacttaaaatatagttgaaaaatgaactttgagaatacctagaactgaaatagatgcatttgtatggtggcagctgagatctgatctaaaggccagttgagggctaataaggagtgaggttaaatttaagcttattactcttttaggaaaatgatgtgagttagggttgaggccaagaaattcttactatattctgaaagtagtgagacttcattcgttagagctaacctcatagtgctcactatgagcactcaccttaaaggttattatctgcctcttgaagaagcacttactcagcggatcctgtaacatgtggttctgccactttgtccataactgattagaccagggcaagcctctggctcaaggctaatggcttatgaagtggcctggtatgaaaactgcataaacagcaataacaagattaatcatctttctctttctctttctctcctgtaaactactccttgagaggagaaagacaggcaattcataatgggaatttaaaataacagtttgttcacttgttcattggttcattcaacacttttttgaatgtctgctgttagccaggtactactcaaggcactggtgatttattcatgaacagaacaaaattcatgctttcatggaacttgggtttgagtgggacagataataaccatgtactagaatgttagcaatggtaagtgatatgaagaaaaatgaagtgggttgaggggagagagtgtgcttaaaggggaatttagataggctagtcaagtaaggcatctctgaggagctgtattaagagatttattatacggaattagttcatgtgggtatggaggttcataggtcccaagatctgcagcttgcaagctgaagaccctggatagctgatggtgtagcaccagtttgagtccaaaggcctgagaaccagaacaccgaatgtagtttcagtccaaaggccagtaggctcaagatctaggaagagctgatgtttcagtttgagtctaaaggcaggaaaacaccaatgtccaagctcaaggcaggcaggaagagttcccacttattcatactttttgttttattcagggcttctactgattgaatgaggcccacccacatcacagagtgcagtcagctttactcagtctgtttatttatataaatgttaaaattatccaaaacaccttcacagaaacacccagaataatgtttaaccaaatatatgggcaccctgtgtcctaggcaagttgatgcataaaattaactgtcatagataggtctattggtagccaaagaaccaggttaagtaaaaatagataggctctaagttacctcagtgacttattgccaggattgcctgatgattacagctgtcttaaattctgaaccttgttgtattacctgaattattttccagggtctctaaagtctggctatatggttgcattgaacttattcttttctccttaagtatgttttatgtaactagtttaacctgtgtgtttctacattcaggcttgacagcctagccattttatggacggggcggagcgggggcggtcagcctgatatataaagatatcacagaaataaaccttgagtcataaaaacctaatatagccgcccccctttactaatgaagagaaacactggtaaagacacatgaaacaatttattaagtaatttgttactttaaaaagatttacattttggttaacttttttagcagttgtttgttctaactctgtgaagagcctgttttggaaatctgaaaatgtaggagatgcagctattgtcctcagaaagaccatagtctgataataaaatctgcataagtaaatatacagcaaagtagtttagatgagaatttaggttagagctggtttgaatggaaaaggcttatgaagatcacatttaagctagtcttagacaaaatttggatagatacaaaagagtgttaaaaatatttcatgaaagggaaagggaaatgaacaaatgagatacatcagagtttgggggatggtagtttagctgtgttgacatggttgtagtcttcttgctgtaggagtagtaacaggtgagatttgaaagttaaagccgaacctcagtatttccatacttttggttgcacattaattcttttgagcctcagattattccatctgttaactgggataataatgccaatatttgttcatatgttttaatcagttacatctaaattctataacaagagttcctttgtttttaatctcagaagccttctaagtagggaaatgagtcatcagaaaccatggcatttccttctcacacatactcttgctgttcaagcttcatgatggagagatcagtatatcaaatgcatcctctataaatctcaccagtatccttaatgcccttatcttggtgaatgtggaaaaactcaaagtgctttttttctgttctctcaacacaacaatcacagaagacttatgtgatcaaatgttgcatagggggagttccccacacaccaagcaagcgatcagttttgcagcagatgcctgctaagtgtcttccaattccattctgacactagttacctggagatagcatgagatctcacaagtcgagggcccagtcccctcccaccgccaccagataccagtctcaggtctggaacttctgactggctccaagttgaggttcccatgcccctctctttgggttagattaatttgctagagcagctttacaaaactgagggaaacacctttaccagtttattataaaggatattacaaaggatgcagataatgagatgcatagggtaaggtatgggggaaggaacacagagcttccagaccttcccagggcacgccatcttccagaatcctccacgtgttcagctatccgaaagttccctgaaccctgtcctcttgagcctttcatggagatttattggataggcatgattgacaaccatgtggaaatgggattggacaaaaagggtataatctaatactaacaggccgagtggagaaacccacaagcctgtctgtccaaattcttcttagcctttctgtgcagcattcctttctcaagggtgtgggacaggaccacttctgaaatgagagtcttatgacctgcagtcagaaaggcaggggaagattagactcttgccttgagctggtgaaaggaggatgggaaaatcagagagagagattctgttttctgaggcctggagcaccccaacatcataaccaaagtctgtaacaaggtatatgggagttaagagccgggagctgtggatgaaaacctatatatatgttccctatatatacaatacatagaattatatatatgttattatctaatatgtaatagatatataatatcacacttggaaattgcactttttctcagtcttttgatgatacttttttatggtagtgacacactaatatctccatccgtatggccacacatgtgctctggatcccattcttttcttcctttttggaaataatatgctatctgagaaacctattttctttctcattcccccattctcactcttcctctctttattggatcctttttgttagcatataaacatgttcaggttgtctctatgttatatgtgttatactatgctatatcatatatactatataatctaattatcctcccttgaccatttactcctctttatctatttcatctttggtcttctttgttaaacttctctaaagaagtagctatatccagtttccttataaatttcccagttacatggcagctcattttaatctagcttctgctgcgttcgctctactcaaatggcttatttgacacctctgttaaaatcaatgctattagccattttgttctttaaaacactctcttcctttggcttcttcagtatgttcttgttttctgtctaggtctctggctgcatcttctgtggcttccttgtcagctcatctttctccagttgctcattaaatgtggttgttataaagctgaatcttaggtatctttttacttaacgactactcttgaataacttgtctctcattgctccagttacagtgacaactcctacatttatctttcaccgagactactcatctgggatccagttctatatctagataccaaattgatatttccatttgaatgtcttaaagttatctcagactcaacaggtttaagacttacaacttctcttcctccatattctctttatcttcaagattatatttttggactcattgtagtccaaaatttgaaggactcaaattctctaccccttacattgtaaccatagtcaattaatcattctaagattcagtttcataatctgtaagatggaaaaaatgtagtacctttcctaacataaggaaacatcagacaaaatgtgaatatgggatgtaataccacggactagatttaccctctagctgtaaacaaatagaaaaccctcctagggttgttttcagtattaaaatagtatttacaaagcccttgaaacaggaccccatgtaaagtaagatttttttaaagtgtctgctttattgttgaatatggatatgaagttgtcagatgaagcttgcaatgatgcttaaatgcttatattataaaaagcagttctcaaatcagtacttttaagattgcattttaagaaactaaaagaaagaatagctccaaaacaagcaatgagaagaaaataaagataaaataggaagcattgaaatataaaagtgtaaaacattagagaaaagtaagagaaattaaaatcttgtttttttgaaaagatcactaatagtgataaaattctagccagactgattagaaaaaagaagacacaaatgagattaataggaatgaaagaggagagatgagtatagattctatagacattaaattggacaacttagattattaaatgagcaatttccttgaaaaacacaaactaacaaagcctgtttaagaagaaatagttgccaaacagccctatgtttataagagaatgtagatttataattaaaacattccctcaaaaagaaaacaactcatcatagaagacttcactgagatagtctatgaaacatttaaagatgaatatcatttccatacactctttctgaaaataagagggaacactgttgcaactcattttatgtcagcattactctaatatgaaagaaaactacagtccagtattccttataaaatagatggaaaaatcttcaatgaaattttagctagctgaatcaatacataaaaaggataatattttatgaccaagcgggatttattccatgaatgcaagggtggtttaacatttgaaaatcaatcagtgtaattagccatatgaaccaactaagaaagaaaactatatgattatttcagtatattcagaaaagtcatttaacagaattagtaccattaatgataaaaactctcaaactaggatttaaagggaactttctcaacctgtctgtcaaaggacaactagtaaaatcctataatatatatatcatgcttagtgatgaaagactgaatgctttctctcttaagatcatgaacaggcaccacttctattcggcattgtatggaaattatagttagggcagtggagcaagaaaaagaattcaaaggcattcaaattggaaatgaaaaaataaattgcttttgtatacagaaaatcccaatacacaaaaaaagcctactaagatgaataagtgagtctattacaaaatcattatacagaaattcattgcatttctacatactagtaatgggtaattggaaatttaaatacaaacaaattaaaataaaaatattagcattcaaaatcttaatgcttatggagaagttaaacaaaattatgtaaagcctgtatgttagaaattattatacaggcctatggaaacaagtgtcatgtctgtgaatcaaaaaactcaaaattactataataccatttctccccaaattgatgtataccataaatgcaattctagtcaatatctttgcaggccttttttgtaaaaattgacaagcttagttctgatatttatataaaaatacaaaggacctagaatagctgacaattttaaaaaagaacaaagtttaatgacttaaattgcctgattttcacacttactagaaagctacattactcaagacagtgtggtattggccgaaggataaacatattattaatggtatagaaaatagttcagaaataggcccagacacatatatttatctgattttcagcaaaactgctaaggcaattcagtggaggaaactggtaatctttttaacaaatgatttttggacaattggacatctgaatgcaaaacaatgaatcttaacctttaagtgggcaatgatttcttagacatacagaaccaaactgtgaaagaaaaaataaaccagctgtacatcatccaaattaaaaacttttgatcttcaaaagtcactgttaacacaattcctatcaaaatcttagcattattttttgtagacatggacaaatttattctaaaatgtatatagaattatgaagtaactggaaacaattttgagtaagaagaatagagctgaaaaaaatcacaccactagattctaactaagacgtaacatacagcattatactcaggacactgtggtattgatcaaaagatagatcagtgaaacagaattaaaagtccagaagtagacccgtacaagtagagccaactgaagtttgacaaagatgcaaaagtaattcagtggggagaaatgatgctttttgcaacaaatggtattagtataattagataataaccaaagaaataaactttgacttaaaactcttatacaacagttatcatagatctaaatgtaaagtgtgaactataaaacttttataaggaaacaaaagagaagatctttttgatctagggccaggtgaacatttcttgtaccaaatccataaaggagaaaaaaataatgacttgggcttcatcaaaattaaaaacttttactctgtgaaagacactgttaagagcataaaaaggcaagccacagactggaagaaaatacttggaaatcgcatgtctgataaatgtgtatcccgaatatattttaaaagtctctaaactcaacagtaggaaataagacaatgcaattagaaaatgagtaaaacactgaacagacacttcaccaaagagtatatagatgacaaagaagcacatgaaaagatgctcaacatgattagctactaggaaaatgcaaatttaaagccatgatgagatatgacacacgtactagaatggctaaaattaaaagtactggcaaaacgaagagttggtaagaatgtagaggaactagatctttcacacattgctggtggaagtgcaaaatgatacagcactctggaaaacagtttgccagtttcttataaaattaaacatggagttaccatatcttactcctggatatttaccctaaagaattgaaaacttatattcacacaaaaacatgtacacaaagccttagaacagctttgtcatagccagcaaggggtgaatagatagcaaattgtcatacattcatacaatgaataatattcagtaagaaaaagagcaagctattgatataccaacaccttggagaatcttaagggcattatactgagtgaaatagctattcagttcttttccctattataaaaatacggctgtcttcttatgagttttaagcctatatacattccagatacacatcctttgtcagatgttttacaactatttttttcccagtctgtggcttgcctttccattttcttaacagtgtctttttattttgaaataattttaggctcacatagaagttacaaaatattacagtttctgggtacctttcacccagcaacagcatttgacaaaccatagtacaactatcaaaatgaggaaactaacactggtataaaactattaaccaaactagaaattttcctcagatttcaaaagatttaaaagattacttatggtaattttaatttgtataacctttttttttttttgagacagtctcactctgttgcccaggatagcatgcagtagtgctatcatagctcactgcagcctctgactcctgggctgaagtgatccttctgcctcagcctcccaaatagctaggactatagatgtgcactactactgtggcagattttttttttctttcattttttatagagatggggtctctctatgttgcctaggctggtctcgaactcctgggctcaaggagtccttctgtcttggccttccaaagtgccaggattatagatatgagccactactactaacctataactttttaaatgaaaaaaatgatagtgacaaagaacagattagtagttgccgcaggtagacttgggaggagtatgtgattataaagggatggcatgaagatgtttctttgaggtgatggaatagttcagtattctttttttctttttttgagacagagtctcattctgtcacccaggctggagtgcagtggtacgatcttggctcactgcaaccttcgtctccagggttcaagcgattctcctgcctcagcctcccaagtagctgggactacaggcatatgccaccacgcccagctaatttttgtgtttttagtacagacagggtttcaccgtgttagccaggctggtattgaactcctgacctcaagtgatctgccctcctcagcctcccaaagtgctaggattacaggagtgagccactgtaccaggccggaatagttcagtattctgattgtagtggaggttatactaatataaagtatgtgataaatttgtatagaactatacacacacagggcatgtaaaaactggtaaaatctgaggaaagtttctagtttgattaatagttttataccagtgttagtttcctcattttgatagttgtactatggtttgtcagatgttgttgctgggtgaaaggtacccagaaactgtaatatttttgtaacttctatgtgagtctgaaattatttcaaaataaaaagacattgttaagaaaatggaaaggcaagccacagactgggaaaaaatagttgcaaaacatctgacaaaggatgtgtatctagaatgtatagtcttaaaactcataagaagacagccgtatttttacaatagggaaaagaactgaatagctatttcaccaaaaataattacataaacggcatataagcccatgaaaaggtgctcaccttcattagttattaggaaatgtaaatgtaaaccaccatgaaataccactgtacacccactagtatagataaaattaaatggcaatccgaagaatgtggaacaactggacctctcacatgttgctggtgcaaatgaaaaatgatatggcctctttgcaagacagtttgacaatttcttaaaaatgtagggctcagcaattccactcctagataattaaacgaagatgaatgaagaaaaagtgaaattcataccagcatcatttataataaccctaaaactgtaaacagttgaaatgtccaagtggtacgtccacacaatgaaatttattccctagtaaaaggactccagcatggatgaatctcaaaatcattagaacaaatgaaagacgccaaacaaaaattacatgctgtgtgatttcatttatatgcagatctagaaaaggcacaataaccaattcagtggttgctaggagttggggggcaaggggtagagagtggagattgaccatatagggaatgtattgaagtaatgggaatgttttatatcatgattttcctgatgatggttacgtaattgtatacattaatcgaaactcatcaaattgtacagttggtacaatttttaggtcctttgcattcgatttgtttttttctgcctagaaagctctctcctctccctgtctggttgactcatattcagtgttcagatcttgcttaaacgtcatgttgtcaggagtatctgttcctgagcccagactggcataggcttctttgacatcctgccgctttccttcattgtccttaccacagctgtagtttcagtcaggcaggtagccatcagcttaaggtctctttttctgtcctagctgcaacactgtgaggagccagatgctgattaccatcttgttaacagtacgtagcatggtgcttaaatcaggtttgaatattgcatgactgagtataagtgagtagagagttgtgtgtcttctgttcttgtaagtggcagctgtggcttctgccaagggtactactagctggggctgcctgcttaaccttggagcctgtctgcctgcctctgccctgctcctggggagttgtgactatccatgctcatctgcctgccatagcctttgttcagacttcttgtcaccgtgaatcccactcctgtggccgggccaccctgttctgagaacagaaaggagcttttccttgctgttattcttttagcagaaaaggaaacctgccctactgcatgcatgttcctggatctactcaagctttttctttttttccagcaagtggagaaactctgaaacacagtgttttgttacctgctttggtaacaatatatcacctcctgtgaagcaccagagtacccctttgtctcctgattatcttaatctttttgagagagacatatgactcctccaagtaaggttaggaatcctaatctgcaggtagtctgaatgcttgggtggaaggtttaaccttcccaaaggtgaaaacaccatcaactttgtgctcagcctctgctcatatttgcagattatcagagatcattattactgtctccatgtcccccgctgacccagtttccaggataaatgtgtagaataattaataaagggcttgacagccaacactcctcttccactcttcccacttctcttcttccttatttcactactgtagtaggtaagagggaattcaggttatggtaggaaaatgattaggatgaacaatccctgtatgtgagcattgtgtgaacatagctcagtgtttaaatcattaccaaagctcctttctttattatgggctgtccacttaagaagaatttatgagtcttgtcatttcagacagtcttccctggagcactacatgactagtccagttagtgattttagaaatgtttctctggaccttttaaaatgtatccaagtctaattcctcatttgtttctagtttatttgtcctcggttttacagcttacatagtttggagtttcctgtttagttttgtttatttttaactcctttaggcctaagactcttcattgtttctctttcatctgagtcattataatagtctctcaaaagttcatattccactcttgctccccctttctcctgcagtacaatctacatgtcgcagccaaggatcaggtcaaggcattctcatgctctctccagtggctcaccttcttacctagtttgtgatctggccccaggacatgcagactgcctagtaggcaattaatatctgctgaattaattctttgtattgtaagtcatatcaggatttcttgggggttagcattatcttaaaaccacaaaaaacaataactttagacctaattggtttcatgacttattgaggaggcgaggaataggttaaagctgctttgcatacattttggaatagtctcttttgtctagtaaggatggataagtttgttaataaccagtattcacatgggtagaaaaaaagtgtcttgatttttaatcctacaagtagtaaaggaatggtagtcagaagttgaatcgtacttttaatgcctcaggcaggatagaatagtattgttttgttttgtatcccaatatgcctaactacttctctctctctcctttctgttttgcttctcatcctttcacccattacagtctcagtatgtgtgttacaccaggaggttgccttggcaggtcagaggatctgtcacagtgaaggcactgtggtaccctttgttttttaggcaaggatgacacatgctagtcaacttatttccatttgttgttccctccacttggcactaaatgagacttaaccatttttgaatcaaagtttataaatttcttacaaaaattaaggtttttattctctataataagcacatgagaaagactggttttaaattttaaactgtggagtgacgtaaaaacatgtttaattttaattatttgctttcttttgttcgtcttgtaagttattaatgtattaatactggtaacttctagattggaggaatgatttatcctaatgtttcttttttaaaaaaaactatcagtcattcatatggcatatgctaatcaaggctctgcggtattttttttcttatgttttttaatgaagcagctcttttcatgatctagcagtctgtgttactatcagtacgtaaacagtaaggactcaaattttaagattaaaacaagttcattttgttaacatcatgttttgttgcatcttgcagcttcttggtgaatttttggatgaagccattaaattaattgcttgccatcatgagcagaagcaagcgtgacaacaatttttatagtgtagagattggagattctacattcacagtcctgaaacgatatcagaatttaaaacctataggctcaggagctcaaggaatagtatggtaagtgtttacttccaaaaattaggcaaagaatcattaactgctaccttttctcctctcgtaatttagataccttggcaaatatttaacttgctttgaaaaattaaattaaaactaaaaattaaacgaaaactattccacagtaaattgtttgcttcaggatcaatggtcttttctttattattattattaaaggttgagtatcccttatctgaaatgcttaggaccagaagtgtcagattttggaatatttgcattggttgagcattccaaattcaaatcagaaatacttcagtgaacatttcctttgagcatcatgtcagtgcccccaaaatttagattctcgagcattttagatttcatattttcagatttgggataataacctgtattattcataagatacaactctataaactagcactgccatctttaagtataaactatgattaaatacttgggcatagccattgaagacaaatatctctatcagcaaagaataagtggcatgcttgttaatttcatgtatacatgtattcccatagataattgtttaataagaagcttcacttagtcatcactttcacactataatgaagcgtggaatttcagaaatcttattctatactggggaatgaagtcagctaatatctcactgtgtgtgtttcaaaattcatccatatgtttaaaattgatttattagctaatttctacaaaagcctcaggctatatcagcataattctttataaactgaaatgcagatcactctttgggatagttctgatactgattgcagatcactaaattagcataataataaactagtgttttggggaattataagcctcactcaagaataattatatttttattacctcttcttgaaacaaatttcagaatctattctaaacaaaatgtaaactgttaagtatttataatccagtatttctcctaggttctaaaaaaactgttttacatgtgcacagggagtcatgcataggattggtgtttgcagcaccatttataacagcaaaaattggaaatagcatcaaatctatcaacagaagaataaaaaattgtgatacagtcatgctgtgaaatactatataacattttaaacgaactggagccatatgtgtcaacaaggataacctcagaaatgtagtgctgggcttcaaagcaagatgtagaatatatatatacatcattataccatttacatgtagcttaaaatatgcaaagcagtaccatatatttatggattatatatatgtacaaaagattaaaacatgcataaataccaaacttaggatgttgtttatctctgagaaaatagagaaaagaaaggaggtttgacctataatattatatttctttctaaaaaattcagagcaagccgggcgcggtggctcacgcctataatccccgcactttgggaggccgaggtgggtggatcatgaggtcaggagttcaagaccagcctggccaacatggtgaaaccctgtctgtactcaaaatacaaaaattagctgggcatggtggcacatgcctgtaatcccagctacttgggaggcggaggcaggagaatagcttgaacccgggaggtggaggttgtggtgagctgagatggtgtcactgcactccagcctgggtgatagagtgagactccgtctaaaaaaaaaaaaaaaatcagagcaattatggtaacgtattaagatttaataaatttgcataatagaatggcatttattatctttcctgcattcttgaagtaatttacaatatcaaaaattatagaagttggagtcattttgtaagccgttttgactggcctgttctcattgtaaccaaccacatttaaccaaccataaattaaatttaaagaaaatcatattatatagtcagtattaggattctgaaagccagctctctgttcagattttgttttttgttttttgtttttttgtttttttgtttttttttgagacagagtctcactctgtcgcccaggctagagtgcagtggcgtgatcttggctcactgcaagctccgcctcccgggttcacgccattctcccgcctcagcctccggagtagctggggctacaggtgcctgccaccacgcccggctaatttgtgtgtgtgtgtgtgtgtgtgtgtgtgtgtgtgtgtgtgtatttttagtagagacagggtttcaccatgttagccgggatggtctcgatctcctgatctcgtgatctacccgcctcggcctcccaaagtgctgggattacaggcgtgagccactgcgcctggcccttctgtatttattttattgtgtccaaaaggatagaagtaatgtgtttacatagaattattcagcaaatcttttgagtagaatttatatgctttttttttttttgagggagtctaccaggctggagtgcggtggtgcgatcttggctcactgcaacttccgcctcccaggttcaagtgattcccttgccttagcctctcaagtagctgggactacaggtgtgcaccatcacacccagctaatttttttgtattttagtagaggcggagtttcactgtgttggccaggatggtctcgatctcctgacctcatgatccacccaccttgacctcccaaagtgctgggattacaggcgtgagccactgcacccagcctcgtatgcattctttatcctaccttttcttgatggaagtacaaggttaaggatttatttaggctttaggctatctagtggagctaaataattatggatttgtacattgagtgcccacgatgtactaggtggatctttgaggcaacacaacgaacatgcagggtctctgttggcatagtccactgtctatttggatccattagcattttaggaaatagttgcaaaaaaatatatgttgtaatagatatagaagacacatgttgagcgtcatagacttggaagggatccagttacttgtctttggagaaagtgagaaatgtatatgactgtttcatgaattcagtttacagatttttgcttgaagtttttttgtgtgtttttgaatttcttattacagcgcagcttatgatgccattcttgaaagaaatgttgcaatcaagaagctaagccgaccatttcagaatcagactcatgccaagcgggcctacagagagctagttcttatgaaatgtgttaatcacaaaaatgtaagtgaacatttttggtttcctaagtatagatgaaatcaagatttattcatgaatatgtgaatatcaaagactaaatattaggggctttaaattgttctgtattaaaacattgtttaaaagggatatatatatatatatatatatctacagggtgattttcctcaactttattaaattgtatcagaagaatggcttctaaaatttagattatatgatttcctgtcatttaatttacaaaaggagttttaaaaagataagcgtttgagaagaattttattcagcttgatctcatcttctgctttttgttctccgtcaggctgacatttagaaaactgtagcattagcacagagatgaaattgttcccattatgctttgacactctgactttaatcatattgaatataaaatttatatcacttctccctaccccactcccacctctttaagtgatggcagtattcactgatcactttatgatgaggatagtgggtttagcagaaagtgtttgaaactatctagagggtattaacatgtttctaattctattttctaatgattgcaaagataagtctttataaagatatataagttgcactcattttgagaataaacagttatacttttttaaacttacattaagcttattcatacttttgtgattgttctaatggaatgatttcttcagttgaggaaataaactaggagtgaattgtgtaagggacacttttaggcagtcctaaaccgaaggcatctgactaaagacatttcgtagtgtttgtccaaaagagtttatataatataatgagcacagtaccttctgactacagataatacaatttaccacattttgagatctaaatatgtgcaggcctctgtgtattggagttactgggttcattatcaagggaaaaaaaaatcatggaagttcaggattaggccctttatttggggagcttacaatggtgttttgaatacaaaacagacatacagagagttaaatatcaaacatcacaaagcagtggccgtttgtcaaatgatgatggtggcccatatattgaaatctaaaaagagggacgatttctgtgagctttaattaactgggaaggctttggggaggagtagacctaggctgactcttaaagatggggtaaaaattggattgttgaaggaaaggagccttcagagaggaagaatgacgtaaaaaaggtccagagacaaagattaaacttagataataatagggaggaagttgtggtagccattcttgttccaagcgggaacttgatgtgttgctcatcacagttttgctggtggcatcctgtccatggatagagctgctcgtgccccttgtggcctgtgaacgcagttccatggcagtggtggtgttgccttagtttttccttggggaggagttcagttaatcctacctctcaagcctgggtgactgcaaagaaaggtggttccttcaactgcatggagtatgactaagcatgtctcacatgattaggcctctagcaggggtggcagaggtttatccaggcagaactctcagcacctagaagagtgtggacaagagtaggtactcagaatatatttgttcagtgagtgagtataaagctaaatatgggaaaactggaaatggtaactgaattattccactcacccatggatggatgtttttgtagtgttttgccttttaaacaatttcatcctctgtacagattgtctcttcactggtctaagcatctctggtttttctcattcttttcatagatggtcttgagtttcttttttaatcttggccgtttatctctgaacacactttgaaagtgacctagcacacactactgcataagccacctagcacacagtactgcacgtctgatcaaatcctctgagaggagctgaggcatgtcatctcttaactgtagacattaaaaccctgtttagaaatttcgtccccatctgactcccgttgtctttctttgttacaggcctgccttacagttcccatctcacccagtctttatattttttcttttgattatggagaattaagtatagtacttcatgtttctccctattaaatttcaaaggtgaaatgtggttgctcttcctggtctactagtgattgctgtgattgcttttttcttccttgttctgacttttcacttgtgggcttcacttcccagttttgctcaggatatctttgtaatagctggattaattcattagcaacttttgagcatattgcagaaattacgtgtctaactatcacagttatccagctgtttccaattcatcatcttattcacatggatgttattattagaaacattttgtaaaatgccattttgaaatcttcatatactgtgtctggttgcatttttctgatttattgctattgttctttgttgtttttattcatggaaggaaatagtatttctcaatgaacttttacctgctcttggtaattgttacttcttttgaagtagttatataccactactaatcattgacttttgcttggctgtccagtctataactgatataatttcctttatttccctttttgaaaaatgggacaactatctgtttgaatctcttttataacagctttattgaaatataatttctgtgtcatgcaattcacccatttgaagtataccattcagtggtttttagtatattcagtgatatgtgggaccatcactacagtcagttctagaataattttatcacctcaggataaaagaaagaaatcttttatcctttagctgtcattcccctacctcccatccttctcagttctaaacaaccactaatcaatcttctttctgtctctatatgcctttaatatttaatacctctcttctactctagggcttcccagatattaatgagaatagatttagtatttgtccaagtctcctattgtgcattgcatgcggttggtagacttgaacttatttagagcagccagatgctttcttattatcatttccctctcttaaatttgtttggccctttctggtgtattatttttccgaatttattcactgaacaaatatttaaataccttatgtaaagctgaatgcttaaaagaaaaacatcaattctgcccttataaagtttatgcctaaaaaacaaattcccatccccaagtatcatcgtcagcaaacatttttatatgtgtgtcatgtaacttgccatatactaggcagtaaaagtgattaagacacagttgtttctaataaggattctctgtggtagggatgaggctgatgtgaaaatgagactagattacagtgtgctgaataccataacaacattagaagataactggggacaaagtagagagaatagtcaactctgtcaagaactaggagttgtcagaatctacaaaagaggttcacctggaagataattaagttgagtagataaatgacaagcatagggaatagtatgtttaaaagcatcaaaacattttaaaaatgacattcttaaaactagcatagctaaagtatgaagtgtaatataggacttagcaggagatgaagtgagttgatggcatatcatggaggcttttgaatatactgcaagggagtttcagaatatatttgttggctttaaatttttgaggaggtaagtaatatgatcaggtctttcttttaccatattataggcagtaaatggtagctggatttgtagaaaaccatcgttagtgacccttaatcagctcaggccaccataacaaaatactgtacactgggtgtcttaaacaacagagatttatttctcacaattctgtaggctgggaagttcaagatcaagttgctggtcaatttgattcttgatgagggcctgcttcctgacttggaggtggccaacttttcaccttgtcctcatttgcctttcttcagtgtgtgctcaaggagagggagagaaaaattgctcttttcgtcttcccttgttttaggccactaattccattatgagcgccccactctcatgacctaatctaacccttattaccttccaaaggccccatttccaaatactatcacattgggtgctaggagttaaacatatgaattgtgtggggtgtgtgtgtgagggacaatcaatctgtaacactagtgttagaaggaattacagcatgaacagtctagatgttagtcttcaagctgtttatagcacagggaatggaaaaaagagattgaaggtcagattgacagtagaatggacagcattctatgagtatttattatggtgcatatactgaaaaaggagttaaaaatcaccctgagccttcttttgtaaaagagagggcacactggaaaagtaaggggtttgggtaggaatgaaaatgaattcagtgttaccttattttgtgagatgtccatgcaaaaagtgaaaagaaatgggttaaacacaatagtgtgagaagggatatgcttatggatgaaccagtgaaatagactgggaatgaagaaaactgggcaagtgcagtattatgaaaaaccaagggaggaaagggctgagattatatagagatactgaattggaaaagaactggtagaagggatttaagatttgctgataaattatgtagaggtttgtataatgtaagtgcttgataattgactgttcataaatggaattacagataaatgggttacagatactctgtgcctccacctatccatcccctcctccaactcctgcccataaagttgcaatatataaaatgaaagcaattaacttgagcttagaatgtaaagaaagattttaaactgatggtagttttttttaactcatgtatttgtagttcccaaattaaaatattatgaagtaatttctaatttttctgtctctcgacttttattatagataattggccttttgaatgttttcacaccacagaaatccctagaagaatttcaagatgtgtaagtgtaataattaaaattttgttaagttagtacatttttcttagattgctgctggacactttagctgttctcttttttcactcataaagttacatagtcatggagctcatggatgcaaatctttgccaagtgattcagatggagctagatcatgaaagaatgtcctaccttctctatcagatgctgtgtggaatcaagcaccttcattctgctggaattattcatcgggttagtagaagaaactatcgtcatactctttgttttctcattgaggtgaaattcatgtaacaaaattaaccattctaaagtggcatttttagtacattcacagtgctgtacaactaccacccatattaaattctaaaatattttcattacccccaaaaaagtctccatgtttcttaagcagttgtgcatctttgccctggcatgataccagtctgctttctgtgtctatagatttgcctttatgtttccatttatatgaaatacggcgtgatgttttcaagatttctccatgtttaccgtgtatcaatagttcattcctttttatgactgaataatattctatataccatatttcgttcatccattcatccatcgatggacatttgggttatttctacctttcagctattatggatcgtgctatgaaaattcaagcacaaatatttgtttgaatatatattttcagtcctttaggatatacctgtgactggaagtgctgagtcatatggtgattctatagttaactttctgaggaaccatcaaactgcacagtgactgcactattttacattcccactagcagtgtatgcgggttccagtttcttcacatccttgtcagtacttgttatctgactttttaaattctagccatcctaatgggtacgaagtggtgtttcttgtgattttactttgcatctccctaacgactaataatgttgggcatttttcatgtgcttgtggccatttgtgtatcttctttggagaaatgtgtattcaagccctttgctcatttttaaattgggttgtttgtctttttgttgttgttttagcatttctttatgtatttcatacatgaaacctttatcaggtatataatttgtaaatattttctcccattctgtaggttgtctgttcactttgctgatgatttcctttaatgcacaaaaactataattttaatgaaatacaattgtttatttcatcacttgtgcttttggtatcatgtataagaatccattgtcaaacccatggtcatgaagatttagtcttatgggctcttctaagagttttatagtttaagtctcacatgtaggtctttgatctattttgagttaattttttgtctggtatgaggtaaggttccaacttcattcttttgtatgtggcaatttagttgtgccagcaccatttgttagagactactcttaacccattgaatggtcttggcacccctgtcaaaaaacagttggtcatagatacatggtttcatttttggactctcagttctgtttcacatagctcctatgtgcctgaccatgtattatactagtaccacattattttgatcacttttagcttcgtagtaacttgaaatggagaagtatcaattctccagctttattcttttacaatattgttttagcttttcagagccctttgtgatgccatatgaatttgagtatcattctatttctgcagaaagggcaattagaattctaattagtatttcattgcatctgtagattgcttaggtagttttgccatcgtaacaatatttagtcttccaattcacaaacataggatgtcttaccatttccttccttctcttcttttttcttttctttcttttctctccttccctcccttcccccctcccttccccttccttcctttctccaccctctcctctcttcccctcccctcccctcccctcccatttgtcttgtcttgtcttctccattctcagctcactgcaacctctacctcctgggttcaaacaattctcctgccgcagcctcccaagtagctgggattacaggggcctgcccccacgcctggttaatattttgtatttttagtagagacagagtttcaccatgttggtcaggctggtctcgaacccctgacctcaagtgatctgcccgccttggcctcccagagtgctgggattacaggcgtgaaccaccccacctggcctctttcagcactttagatgtatcatccattgctatttgttttgccatggcttccagtgataaatcagctgttaagctcattgaggatcttttataagtgacaaatgcacctctcttgctgctctcaagatgcctttttgtctttcgctttcaacagtttgattatgtgtcttagtgcagatctctttatgtttatccatcttagtattcattcagcagcttggatatgtagattcatgtcttttttgatcaggatggaaggaagctaaaaagaaaaaatagattcatatcttttatcaaatttagcaaattttcagtcattattttcttaaatattttttctgctcatttttctctttcttctccttttggaactcccattatgcaaagttgatatgcttaatggtatgccatgtcttgttttctcctccactttaatgttttgtcccaggcagcattgggctatttacttgccttaaccatgttttcaaggaatgcctctgtctaaccttggaccagggtcccacactgaaaatgtggctgctttcttcaaaatcctttgctagttagggaggcaggtagagccaaagactagttaaaatgctggaaatatttcccaatgttttttccccacctttttattgtagtaaatacatataaaatgtgccattttaaccattaaatctacagttctgtggcattaaatacattcataatgtgcaaccatcaccaccatccatctccagaattcttttcatcttgtgaagatgcaactctccacccaccagacagtaattccctattctcctctccccgcaacccccgacagacatcattctattttatgtctatatgattttggctactataaatacctcatataagcggaatcatgcagtatttgcctccttgcaactggcttatttcacttagcataatgtgctcaaggtttatccatgttgtagcatatgtcagaattttcttccttttcaaggctgaataatattccatttatgtatataccatacttgcttatccattcatcagtcagtggcaattgggttggttccacatttagctcttttgaaaaatgctgctatgaacatggttgtccaaatatctctttgagaccctacttttcagttcatttgggctacagccagaagtggaattgccggatcacatggtcattctttttaacattttgagaaactgccacactgttttccatagcagctgtaccattttacattcccaccagtagtgcagaagggtttcagttattcctcattcttaccaacacttttatttttttcatagtaaccatcctaaagggtgtgaggtggtttcctgtttttaagttgccattttcttggttctgagttcacttgattgccgtaaacctttgaataatttccagaattctgaaaaagtttattctgacactttgatgttttatggtgcttctgtggagctattttggctgacatcactgcctctcatcaaattcttagtatcactgtatttcactgatttatatggagcaatgtaaagtttgtttttgctctgaagtgaagcagtatacaaaataaactgctgttattaccagtcattccaaattgggaattgaatattaccaagttaccaaaattgagtatttgccagaattgttatatatatatatatatatatatatatatatatatatatatatattcagaaatattttatatttttgttctctgggatttttacctgcttttttgctatataatttacatgccatacaatttattcatttaacgtgtaccactcagtgtttattatatttgaagattgtatgctcgttaccacaatcttaactttagaaaattctattgccctaaaagaaactccacatccactcatctttatttcccattcttctgtgttcctttcacctctagccctaagcaaacactaatctactttctgtctttgtatatttgtctattctggacatttcatgtacatagaattatataatatgtgatattttgtgcttggcttattttacctagcataatcttttcaaggttcattcatgtatttattgtgtgtcagttcttcttgtcattttattgacaaatatttcactgtatagatatattgtttatccatttatcacttgattataatttgggttgttaccactgactattacaggtaatgctgacatgaacatttatgtaaaatttttttgtgtgttggtatgttttgtattttagttaaatctagcttattctttgaaaagtattgagaggatttttttttttttttttcctgagagacagaatcttcctctgtcactcaggccaggatgcagtggcgtaatcatagttcacttgcagccttgaactcctgggttcaataggttgaaaagaattttttttttttttttttttttttttgagacagggtctctgtctgtcacccaggcatgagtgcagtagcatgaacatggcttactgcagcctttacctcctgggctcagtgatcatcccacttcagcctcccaagtagctaagactatggacatgtaccaccatgcctggcaaatttttattttttatttttttgtagagacggggtcttgccatattgcccaggctggtcttgtattcctggcttcaagcaatccagctgccttgacctcccaaagtgctgggatcacaggcatgagccatcatgcccagcctggaatttttaaaaattatttaattcagtggaattacatcttccttctgagtcatctgcgtcaaataaccttactcatgtaataaaataaatacagagagagttttcacagtataagacaattatgtcttagggctattggggctttttttttaagtgaacaatcctgctacaggcttatccttaattatcattgtaagtgaattccttgtatattacatatacagctgctctaatcatttgtctaatgcaatctttaaataacataataaaaatctctttaaatgggagagtattttatcttcctgagcccctactcatacagtatgtgaagtagagcagacgagtgaaacttctaggtttgggttgtttgtttcctgagtccttagaccggggcagtaatccaacattgtggaagttcatttgattttagtaaagcacacccctccaaatagaaaggttccagattaatgaggatagcaggtggctggaccagaaaaacagaccaaatggtagaagatagaaaacaatggaaacaacaagaaccacaaaaaacaaacacaaaattacaaaagagcaatatttatggtaatatgttaatcggattagttccttaatttaaaaaggtcagattttggcagcacacaaggctcaacaacaactgcgtatttccataacacaaacattcgtagctaacttcaaaaggctgaaggcagagaggttggcagacatataccaggaaaatgcaaacattaaaacaagggtaactctatttaatgagataaagttgaatatggtggggtcagagaggaagtgttcctctctgagaataaagagtctcgcgttttcaaggtgaaagatactatccaattaggatacacaattatacatgaagtagggttgctatacaaaaagcttaaactgtagaaaatagaagaatggcacaagcacagttgtattgggatattctaacttactcccttagtatcagtacataaagtggtaaaaatgaagtacatctgtagaaaatttcttaatgtgataaagtggagctaatgagatctactggggtctgttatctattatgaagaatctccctttatcttggcttgggctctttgggaaactctagagtggggatacgcatttaagttttttgcaggtggtcttgaggccacgattggtactcatctctctgctctactacttattctagattcacctccacccttggctagtacttctgctagtctgaggttacttacttggtaaaataacctgacctttcatcccttgggggttcagggcaagtcaggattgctactgtgagaccaaagctgacgaggtcccaccatctagatagttgcgggtcactttgtcggaaagagaaagccaagtgatgtgcatggatggctcttctttgcttggaagtgacacacatgacttctgcttagagtgcattgacaaagctagccatagacttgcttaatttgtaaggaaactcggaaatgtggggagagcagacttcagcatagtggtgagccccagcctctgccacagtctgttcttctggctggcaaacattcctttgctccctttattccacaccttcttaagggaaataacccaaagttctattccatcaagacatttatcaaatccaggcattgttcctcttggtccagaaacataggaactggaatgaccaaattatatggccaaccctataaccactgctcccctgccaaataccatagatggagtggtcagacagggccagtgttatcacagtgaacaatcccatttagaaaactgaaaaatgcagtcattggttagttgtaattaaattcttctgtacagacattgtgagtgtcccttgccgtgggtggggaatattcctaatcagtcctcctgactgatctctgtggttctctatagtacctggctctaccctgtgggagagtcatctttttgctatcctcatgaatatatctaaagtggatattgaagaatgtattttccttgagggctgctcacctttctcagcctgcttcttacctataaaagattggggcccaagggtcattttaaggccatccttctcagccttgccactattgacattttggagcaaacagttctttcttttgatgatggaatgtttagtagcattcctggcctctacccactagatgccagtagcactccccagttgtgacaatcaaaaatgttttctgacattgccaaatattattttggggcaaaattactgtgaattgagaactcctgtttgaagtgtagaaggatcatagacctttggcgttaggtctgacagttaactaactctttcagaaatttaagagatttcttatctttctgattgtagttcctttcatagtatcttttttagctcatgggtcctgtattcttggacttaattgaggctgtcttcagtcttcctgtaagctttcaagcttctgttggcagactgaggcaaatttatcaattgaaaattttacaggactttttccctgaaagggtttcataattattatgtgaaaatgatgcatagaaaccaacccaagatatcagtggcttaaggcaatatttattgtttacttgggtctgcagggttggctgtgtgacactgctccaaactgtgggtcaagttcaggcttgtcccatattcaggtttcagcatctaaactgaagcatacaccagagacatccttttctcatggtgaaaggtagaagagcaagagctatgctgagtcaaacacattcccccatattccattggacaaaataagacaagtgactgaacctatcgatagggtgaggacacagtctggggtgagcaggaatatttgcagaacaatctaccatactttcttccaggggtctagtagcatttagcttttccaaaatggcaagaccctgaaattctaggctctgttcccttttatttctgctttaaaaggtggctacttcttttaaatgcaaccagtagctaccaacacaaactactgaagttttgctttccagtcttttctagagcagggttcaacaaactttttctgtcaaagccatgtagtaaatattttaggctttgtggataatagtctgcgtcacagctacaagactctgccattgtaacacaaaagcagccataggtgatctgtacttgaatgagcatgactgtgtttcagtatcagcactttctttacaaagcaggcaggccttaatttgccagcccctgtgctagagcttcaggttcattgtacaagtggctgtgcaggtgacagcttcatgaaatgttttgttactacgtaacctagatcacctttccagccttcgatgtgagtttccctgctgctcaactgctaagccaggatcttatgtttttataataattaacaccccacctctgacaccagtttcagtgttagaatagactcagctgtactgaataacagataaacccttaattctcagtggcttagcacgactcaggcttatttcctttgctgaatgtgtggtgcagatcatggtgggtttgtggactgtgcgtttacatagatgatcagcaacccaggctgccagagaatcctctggaaagttcctaatcaccaaagcagggcaggagatgacaggaagttgtgcactggcccttctcttctttacttccactcacatcccatgaactagaactacccacgtgcccttgcctaactgaggaagctagaaaaattgggggaagaagacagaatgttgggttagttccactgcctgcataaattctaagttgctattcttatatatagttagcagtgtaattaacagctgtaaggtacatattgatatatatggatgaatttcaattaatagtctttgaggctttttttgacaatttttttgcttaacaaaaatatctgtctttaaaaattgttactttgctcttaattttttcacaatgaagtgcttgaaattggaatgttatttctaaattggaatctgctagtataaagagccagtaaccttcaaccatcacactaaacattgaagtagtatcaaagcttgtaatatttattcttaaacatgcagtgtttctttgctgaggtactgtattttagaagtattagcaacattatatttacagaataccaataatgaaaatttttttcttctgtttcattaagacctttgaattgttggtatatttaatttcataaaaccactagattacatatcttctaaacccatccatgattgcctgtcgaaatatgttaaagacaacatacatgcttttctgtatgttaacattacaaaagtaatacaaaagtaatagttgtctttcaagcaggctattttccttttttgtattaatcggtgatatttaatatgtatactgcatgtcagtacaggtaatacagtgcatttgtgttgtggatttatgctttcttcgttttttggtcctttggcttataatagtattcatcaaagctaacaggcaaagtatgttaaacatgaagccatgagtgtttatgctgctgcctgacttttgatgggcacagcacagaatatgttaaagtaggggccaggtgaaaaattctgaattattcagtagtatctatagcaagtaattttatagattagtggcaccaaggcaatggtgtcctacttctacaaacagacagaaattttatagcaaatttgtgtgacttcaggtgggaaatcagggatggaaaaatggataatgactcttctagtcctttggaactgggtatctgccagtctaaaagatcaaataacatttgttaggattgacaagatggctcgttgttgacttaaaacatctgtataaagcttattgtgactttaaaatgagattttaaaaatattggtaatatgttatgcaaatgaatataaatgctaacttatgactttcttttactatagtagtttttttatgtgagctttgcgatgtcttttcaaatcccttttactctaaccaaaaatgtctagctaatcataatttctagcaattaaaacattactaacttctctaataactgtatgtattcataaattttaaatcccataaaactgacttctcaggtttgccttttaacgatgaatcagtgcagtaatattacagtgagaaaaacgaacaattaacatgaatgttttgcaagggatagtataactttattgtgaactgtaggattttcctatatatcatggcagtcattttttaatttttattttctgaaggacttaaagcccagtaatatagtagtaaaatctgattgcactttgaagattcttgacttcggtctggccaggactgcaggaacgagttttatgatgacgccttatgtagtgactcgctactacagagcacccgaggtcatccttggcatgggctacaaggaaaacggtcagcacacacatttatttgaaatatttttctgatttagcttttttctttattcagtagatttttaatgtaaatacttaagcagaagtacgttgagttaaatgtgtatcattgtttgaaatgtgtatcaaaagtttgcaggtaactataaattttttcatcaatgtttggaaaaacttggggcccttatttgtttaaatacggatacataacatcagtactaccattggatgaagaatttgttgccgtggccctgagacagaatttatgctctttgcttgcctataacttgaaaatgaacatttctaacatggtctcagggatgtatagtgtactgacagtttattattagtgtacatcagtgatatttgcctatatttccaaccccatgaaactaaagctcatagcagtagcactcattgtaaattttaagagatacattaaggcctctgcaaagctgatggataattaaggtgacctcttgaaggaagcagtaaagtttcattaaaacgttgtatccagccttaaggaaatgacttttagtattttgtatgggtatatccagttgtatcaatcaacctaagaatcagtgttgaacaaaattatctggcatgtagatcatgaatttaaacattttgtatgcatatacctacttatatttaatttaggaagaaattttgttgagtcttagaaatttaggagatgaataaatctgctaagaagcatgggattttatggaaataaaccatcgttttaaaaaatgtggtgacttcatccaaaatactaccaagaataaaacctagacattttttctggcaaggaatctggaatagcagttcattttgaatcaggaaattgtaataagtcaacttttaagattctttttttataaaagatacaattaagctgagcttgattttctgagctgattaaaaacaaatactttaaacatttgctattaattttttattcttaagtaaatatgctgttctttttacttacactctacctgaaatttgaagttttttattttttgggaattgataacttcacgtgacccaccagcatgaagattgcttttgcatttgctgtaattgattgtcatagatatggtgttatgtgtcagtgtcctataaatatgatcttaggatagctccctgccagaaattagcactaagaaaaactgtcatatatagaattgaggctgggtatggtcgcttacacctgtaatcccagcactttgggaggccgaggctcgtggatcactcgaggctaggagttctagaccagcctgagcaacatggcaaaaccctgtctctactgaaagtacagaaattagtcaggtgtggtggtgcacacctgtaatcccagctattctggaggtgaggcatgagaatcgcttgaacccgggaggtggaggttacagtgagccgagattgcaccactgcattccagcctgggcgacaaagcaagactctgtctcaaaaaataaaatagaataaaaaatgaactgacatatggttcctctttagttaagaattatgtagatcaccttcttgccttcccactcccaccctaggaaacggagtcaaatgtaatgcttaatgattataactacattagccagcaaggttaaacataagtacttcctccttttaatgacacctcacactcattttatttatcttatttatttatttatttatttatttatttatttatttatttttgagatggagtctcactctgttgcccaggctggagtacagtcatgccatcttggctcactgcagcctccacctcctggcttcaagccattctcctgcttcagcctacgagtagctgggactataggcatgtgccaccatgcctggctaatttttgtatttttagtagagacagggtctcattatgttggccaggctggtcttgaactcctgaccttaggtgatccacctgcctcagcctcccaaagtgctgggattacaggagtttgagccacaacgcctggcctcccacccattttaacaactttgctttatgtaccttttattgcaggctactcagagcattttggaaagcagtgtaatcaatatatttttaactgcttaatagactaagcagttagtttacagctagagttgtgcatgaatcagacttatgttcctagtcttcactggcccagataatatcttctctcatgcttgcagctttcaaaatacttttgtttaaaaatgagcttttctgaaagttaccaaataagttgtaagctggatatttaaagtttaacattctctataaaatctgtagagaagatttattctaatagatttttgtcaaaaacggaaaccttagaaaaaatttttctctgaggcactaatttataaatattaaattttttttctaaaatcttatccttgaaagctgaaccatgacataaatatgaaaatattcattcattttaatatgacattttagggaaactttagttccacagtatttccaaaagtaatttccagtttagctcttaagactcttcagtgaactggcagccttttaataagaatgtactgtattagaaagtacaggctttaattttctaagtcctttaacatgagtaaagggcacgtgtctttctgacatctatttgtgccgttttccacttgtcattttaaagaattgggaccttcagatgtcacaactaaatgcaagtttctaaggcttttccttctaaattgctcattcttccctcttttcctgttacactgcaagcacttactctctcctttttgtgtgatgttcaaacccaaaggcataaaatgccacgatgtgttgtcagtttcccttagtaagtggagattccaaattgtctgtttctgtgtctagcagattcttgtcaacattgattgggattcccatttacagttggcaagggtcatcagtaagtcttccaggagactcttcatactcaattcgtgggaactgacttactgtatctagccaaaactaacttcttaagccaaaagcagtttggttttatgggtttaaaaaactttaggtaggaaacatgaaatacatttctcttactaagttttccttgattagttgttcattctctgtgcacttgttccttttgggatagtagggtaaatgtagcatgatgttgccaagaaaacaaatggacttttaattcagaacaagcatagcacttctcagttaaatgtatttgggaaatccagtttaaaaattccaaagagctttagattaacttttttatcataattattcatagagattatttctgttagatattttaatatgctgaattattttctcatgcttttttcttagagagtataatgcacagttgaacttctaaatagtatagtataacaattttatttttataattttactacctcatgtacatttttatttacaaagtttgtgtttggttctatttcatattttataaacaagttctcagggacaaacatgcagggtttttctatttatgcaatttctgtgcatagctctcactttgaaattagatatgtagttaaaatgccacactttacattttcttttgtgaaccagactttcaaaaaataatttgtgttttaaattattccgttagctaaagttacaatcactttttttcttttcgtgacgttttgcagtttttatataatgcagtcatattatgcttctttgattttaatgaccttttgctttgcttttccttcttttgtgctgcaaacatatagtggatttatggtctgtggggtgcattatgggagaaatggtttgccacaaaatcctctttccaggaagggactgtatccttgtgctgctgcagcagttaattagttaggcgatgaacttctttatgttctctaatgaaaatgaatatgctacatttacacagatgggtttttaaacaggcataaagtttgtggctattatagttcaaaaattgttgagataagaagctgaaatatttgtaggctgcatctggcagtaggacatacagtctctgctggtagtcagagcacattcactgtcactcatttttattttatactgctttttataattttaaagtatacatggtgtgtgtgattttatttctttctttttttttttattttaaccaaaatctttatgttaatgtcattgcattttgttttcagttgacatttggtcagttgggtgcatcatgggagaaatgatcaaaggtggtgttttgttcccaggtacagatcgtatccttatctttggcctaaaatgtagtttctaaaggtcaaaatgtatgatagcacttcagtttggtcaggtataatgtattttgtctctccctaatatattgttaaattactcttaaaataccacctactatttgacatagacttttccttccgttatttattgtttcatatgttaattctgaaccctgctcaattgtaattatgcacaattacttgctggctttgagttgatttaacctaaatcaaaaatcatggcttgcattaaaaatttataataattatacacttaagtctagaaatacgtacaacttaatatgaattttggagctgtctgttgcttctggccatccttttgttttgtcccctacctcctttttgttaatgttctgtgtggtttgtgtcttttgattgttgtctcattactcacataacatactgaccctttcatctgagaatttcagcagtagtagttttgtatggtaacgatagctttggattcatactttttgttcatcccactacttttaatatttatattaacagtgatttgttatgtgtttaccagctagtaacacttagaattgtttcaggaggaagaatgggaaaaggcatattcacaaggttacaataagtgagttttaggccttggccttcagggtcctggagtgtaaagactagaggaaaggagaccaagaaatcctaaccttacaacttagcaaaaaactgaatcttttttataagggtcagagctttagaaaatttttttaaacctaagctaaacaaagaatggcaaaagaaaatgccacttttatcgaagcctttatttttattacaactgattattttctgttagtgtagaaaactcagtaaaacaggatgtgttctagaaatattgtctaggagatataatcatgttttctgataaattgacagaaaaggaaaaattttgtatattattatagcattgtgtgcagtttgcagttagagccactatggatagtaattgtcattattcttagttgcttatcattttatttagaatttgtgagtttaagcttccattttaaggtaaaatcagttagtttgaacacacaataaataaggttaataaagcttatttattgatcatttctgtccacctacaatcattgccttttgcagggtgcctgtgagatataaaatttataactgccacatcctttcttaggaatttttaaatttctattttcttgtaatatgaatatgactaatgtattgaacattagttatggagtatttttcttagctacttgatattagatattgatcagtggaataaagttattgaacagcttggaacaccatgtcctgaattcatgaagaaactgcaaccaacagtaaggacttacgttgaaaacagacctaaatatgctggatatagctttgagaaactcttccctgatgtccttttcccagctgactcagaacacaacaaacttaaaggtactttttacaaatatgtacatttaatcccatttggggtgtgtagtgtgtgtgtatgggtttgtgtgtttatatgtattcatattcttatgggacatgaacccaaggttttctctggatggtggggaaaaaaatgaggtttttgttttttttttctttaatcttatatattttaatcatatgtataagataattttacagtaatatttttaaaacatatgctttttaaaaaatctcaaattgctgaaagttattaataatttgagaatctttacaaatatatgtacattaacaccattatgtttgcagccagtcaggcaagggatttgttatccaaaatgctggtaatagatgcatctaaaaggatctctgtagatgaagctctccaacacccgtacatcaatgtctggtatgatccttctgaagcagaagctgtaagttattttcttaatgtttacagaacatattgcattcttagagttagaatgacagttaggtttggaggagaccttttaattttaaataaaaatgtagatacatgatgatgatgtttttctgtttcttcatgaagactacgtcaaataaactaatgaacatattcgagcccctcctacacaaaataaagttacctcccactgttttttgcaatcttgcctggatacctaaccagagaactaggatgttgaatgctctgggggaacatcctaactcaggtataaaacaaattactgtatccaaaggaaaacagaattctgtgatctgtgatataaataaaatgtggcaatttcaagagctagaagaaaagaaaaaagacagttaaacattttatttcctgcaatgaaggagtcttcctaaactattatgtctgtataagtaagttgatgattgatcagtcttgatctaatgatatatttttataagtcatctgtgtggctaatatttcaaataactacagagttaaaatactcccagcatactgacttggttattattgccttgtgtttttcagccaccaccaaagatccctgacaagcagttagatgaaagggaacacacaatagaagagtggaaaggtacattcgtcagattcttagagggaaaactgtgaaggagcttctggtttttatatggtgatttattatcatgttagagaaatttgtgactttaatatgcataaccgaaatgtggtaatattaatatttttacataagtagaaagtaagtctgcttccttccttaacttaatcttaagttcccaagtttcccaccccagacacagacacattagtgctctgtctcatatttttttccatggtttgtgaatacacaaatgtgtttagtgtctcccacctctcctcttccacccttttaaaatcacgtatggttgtgtacggtgtatgctatatgtacttgctttgtttatttattatatatttttttgagttggagtctcgctctgtcacccaggctggagtgcagtggtgtgatctcggctcactgcaagctctgcctcccgggttcacgccattctcctgcctcagcctcctgagtagctgggactacaggcgcctgccatcacacccggctaatttttttgtatttttagtagagacagggtttcaccatgttagccaggatggtctcgatctcctgacctcgtgatccacccgcctcggcctcccaaagtgctgggattataggcgtgagtgctttgttgatataatcagatatctggaaggttattctcttttagttcacgtatctgcctctcttgctttaataactggttagtgttctgctgtatgaatatgtcacactttatatatccatctccctcttggtgaccatttaaattgtgtccagtctgttgctgttagaaacaactctgcaatattcatgttcacatatgagaacatgcctggaagaaaaatcctggaaggagatgttctgagccaaagatatttttcagttatttccaaattactctccaaagaaatggtagtagtgtacacttccgtccatgttatataggagtctctctttgccctcacccttgcctacagaatgggttaatttttaatatttgtaaatctaatgtagttttattctattttatgaatgtggctgaaattaatcatgctttgatagtcatggaagttttcaaatatttcttcaaaaggtgccctgggacatgtgggtcaggtaatttttaggtcccgtttacttccatttgtgttattgtccttcagtgttttgaccacttttgtaactgcgtgactttgagtaaatcactcccccttcatctcaccctcctacactgccccctgcattttacctcatcttaaaatagaggcagaagacctgttattaagagttgtctctaaatcctgggaaaggaaaggggactggggaggtataaacatgaataagtgacccatctataaatgtattttgctaagcatgaatttgattctttcttagaaattgaagagatttagagattggttttctctgaactttgggaaacccatggttagcagagcccgtgataaagttagaagaatgacaaaatgataaaattggatagagtctgctgcatttgaatatgtaatgtgcatttgaatatgtataaagatatagctctgtactgagtatgtatgaaaacattaacctaatatttttacatcctactaatttacagtagacgatgaagtattttgtagaatcttgtggtttttttggttgttttttttgtttgtttgtttttttgagacagggtctcactgtgtcccccaggctagagtgcagtggtatgatcatggctcactgcagcatcaaaactcctgagctcaagtgatcctgctgcctcagcctcccccgtagctgggatcacaggtgtgatccactgcacttggctaattttgttttttttttttgagacagggtctcactgtgttgcccaggctggtttcaaacttctgggcttaagtgatcctcctgcctcagcctcccaaagtgctgggattataagtcttaagccactgcgcccagcctaatttttaaaaaaaaattttgtagagatggggtctcactgtgttgtccaggtcatagactcttaataggccagcagttgtaaggcacaccattatgtgccacaaagaaaaaaacaccttcggttgtacagcaccattggttataagatatagtcaatttcagagattaaactgtgaaaaaagtacatcttaaaatcagtgagatacagtgttttcatttgtataaggatatatttgggggttttgattgctttaaaaacatttacctttattctgtatcctttactcctagccccaggtgcatgtcagtaattacccacagactgcctttttcaagatctacttaagagttttagcgcatagcagaaagaaagattaattgccaaagccattaattacagatggctttgcctagttagtgctcctaattagttttggttcttctgccttaatccctttgtgctttttcccagaggagtgctattttctctcttaaaaaatcctcttactgcaaatgtttatcattcctttttgtttctttgaagaaaaccatctcttattctctcctttatcagtgctttctatttttctccttccaagccttaagttactatagcaaacaaacttatctccagttgttgttcattccaacatattcatttgttttaccttattaccaatataaatgtcatactctgtaatcagggattctttatcagaattttattcttcaggaattaacacagactccttgaaattcgatgcaatattttttgtttgtacatttttctcagaagagggttcactacttttatacaattctcaaaagattccatgacccaaagaagatgataaatagtgttgatgtggcatccaccattaaggttaagtgtggtgtgccctgtgagtctgaatgtctacttaagaaccttaagtagacattaagaaccttaagaaggttttttgtttgtttttgtttttttgttgttgagatggagccttgctccgttgcccaggctggagagcagtggcgcaatctcagctcactgcaacctctgcctcccaggttcaagcaattctcctgtctcagcctcccgagtagctgggactgcaggcgcctgcccccaagcccggctaatttttgtgtttttagtagaaatggggtttcaccttgttggtcaggcttgtctcaaattcctgacctcaggtgatccacccacctcggcctcccaaagtgctgggattacaggcatgagccaccacacatggccgaaggttcttcttaagtagacattcagactcacaaggcacatcgcagttaacatcagaatcacttctgatgataatataagtgaagaatataagacaggaggcgcatatattaataccagcagagcagctcccagtgtgtctcttcagttggaacagttgttgcagtggtctacttgctgtccagaagcctgataagagaaaaagattcccatggagaaatgttcttcgaagtgataaccatgcttactcataaggagttgaaatgtagcttacctgctagttttcctccaataaaaatgtgtttatctttcattctgatttgttgtgaagcttttgcacactctaatttaaatcttggtagcatatatctagttgagtacccacagtgcaccaggctctattccagggcccaggaaatggaagtcagtaagacacgtggttcaagccctccctgagacagatggtagtacagaatggtatgtggtatgatgtgctgtagcacaagttgctggtagagtgaaaaagaaagcttctaccccagcactatcaaaccaacttcagaaacagtgaattacaggaaagattagtacttccttttaatatgatccattgttgagtgtcaaggaattgttattaattaacatccttgaatcttaggccgacatttaactgactgtcattgtaaggacactgtttgaagtacttcacatgtataaaaatttccacttaaaccatacatgcgttgtgagattggctcttagactttgaaaagttcatttttgtttacttcttttacagaattgatatataaggaagttatggacttggaggagagaaccaagaatggagttatacgggggcagccctctcctttaggttggttacaatataagcttggttaagattacagtttacttcttgtgttgtaatcttcagtggcctgaaacctgcagttcttcccatatttacaaaatcattattattccaggcttaataagtataaggaaatacagttttgttttttctactaatacattatactaatatatcagtaactgttcataagatgcacatctttttctatgatactgacattctgaagaacagaaatttaaaaactttttgttggcattgttgctgggtctttaaagaggaaacttctcaaaattcaatatacatacctttctatgatcttgacagtctttactttggataaataaaagcttcactgcaaaatttagtacatgtaataccaaattgctgtctttctctttttgatattattgatttgttgaatgaaggcaataacattaaaaccatcactagaaagtattctttctctaagaagaaaactgggtttgtaggagttaaaacttttttttatcataagctgatcttatatttaatgttagtacaagtaaaagtataaagaatagaggggaaaagttaaatggcaggtaacatgtacactaagtacataccacataacagacactagtggtttatatactttatttcattcagcccctaagatcctaaggtataggattattgcacacatgttatggatgaggaaactaaagttcagaaatttgaagtaacataagattccaaatctattatgtagatgaactaatacagtaacttcagagtgtgtggttttttcagcctcccattttgttatctggctggcaacagagacttctctggctacagaggttaggacagttgtatgaaggaggtgaaatttgagctgagccttaaagagtgagtagtatttcaaaagatcttgattttgaagtaaaactatgccattttaattcctcagaaacttctacttttgaggaaaaaaatagatgttgtatctagcatcttgtatatgggtaaggttttttaaactatagcgacattgtatactataaacataattgtttaagccattttttgtggcttgctttgacatttttggttatatattttagagttgtatattttaaatctttgatcaagaatgcaatcttccagattatagtgtagatcctgttgaatatatgaattggttttgaccgcttttacctattttggaaatggccttttctctacaatttacttataacaaatttaaagctctattataaatgctttgtgtaattaattagctttgtattgctatatagtagtagtagtaacaattgttcatgatggaggctcaggtgggatttgaaaagttcattatgtgggacagttttatactttagcatactatccaagtgagtggcacagctggagtgccagatgtttgagtaaatgtaataatttcatgagttagagcatttgtatttgttcttaatttgtaagtgaataatttgaatcttagtccagcacttgcttatgatcacaaaataagtcagtgaaaaagatagaaattgaggtttctagactttttctggatcctcagttatagcttgcaaagacgagtattagcaaattaagctgttataaaaatattctgctcttgattttgtactaaaacagaaggagtagtgtttggtaaatcaaaataccagataaccacagtaccatttccacttgatttttaaaaggaattttattctttttccctgtcgagtgccttcctatctttgttttggtttggctaatagtaaagtaagtttacctgccttgagtgtatagaggctcacttaagagaggaatgacccatgtgagactaaagattttccatattattaccattcagatatttgagaatttactgtattgctttaaagagaaaacaagtgtgtgttttttccccttaggtacttgatttttagattaaaaagttaacaatgcatttaaaagtcaatttttatcagattaagacatttgggtaaaataatagaccctgaactagaggcatatataaaaattgtatatgttggagcccttttatggtttgaatgtttcagtacaagtcttagaaactagtcattgtgtactatgtatggtacacagatataccatactgttcagtcagaaaaggctcattccaagtattgattgaactaaatagaatatactatctgaatttcactctgactgggaagctaatggacctttcttgggtctaggagattatcacctcttttacctctcatctctcaggcctgaaatgctcatcctgcttttctcttccgtttcagctcccatcacatgctttgtctcttgtggttccattcctttctgtatcccagtcccctccctaaagattttcctattcccactacactgcctattttctttttgcatttgaagaaaagctcacagaagacttttcatattgaagtgtttcattgctcatctggacagaatggagggatgatctcaaatacagatgctgggttcaggagcagtggttttcagcccatttggtttcagcatctttgggtgcctgaacctcaccctcagaaattctgctcagtgttccatttgaagaccattgattttatttcataaatgtattcttgagaacttttaagtaacttgcattattccaatttggaatgacccttatttagtgttcatgtggttcagaagtacttagcctagtgcatgagttacctttaactatccttcatcccccagcataagtcattcctgtccccttcctaaaccaatccccttgagaggatttctgtctcgagctcaggtattcctgttaactttttaaaatccaggaaatgcttgttaggtaatactttcggcaaaggaaactgtttgctcttactatatttaataaatccatatttctgcttatcaagtattagagtagaaataagaagacccaagtttacttaactaggccacttgagtgacagtggcatgtcccataacctcgtgtaaagtggggcagttgaattgaggtttcttcctgttaaacttaattttattccttgtcttggcatttgctttaaaacaagatgtgccagaagtacatcttgtttcaaatttgaatcatttgaatttttcctttttagtgagaagctgtaaagacttttttgtagggaagtagcttttaacttttgtagttacacagtcctttaagatcctctgtccaaaaaaaggcattacagacagttttgcatgtattatcagcagtattcacacataccctgaagcccattcatggatcttgctgcaggaccatttctaaatgtggttcagatgtaaaattcttgtcttaaactgaaaaacacattcattgaaaggataggactccacgattctagacattttcagaattctcacctcatagctgtcaatgaagagtgtttttaagttagtgtgttggatatcatttgcgattatttttagtgagccttcgaaacccaagagaaaaaaattaccactggaggcagtcagtgcagtgcaagtagcttgatctgcagctgtctgcaactgatttgctgttttgtttctcatagcacaggtgcagcagtgatcaatggctctcagcatccatcatcatcgtcgtctgtcaatgatgtgtcttcaatgtcaacagatccgactttggcctctgatacagacagcagtctagaagcagcagctgggcctctgggctgctgtagatgactacttgggccatcggggggtgggagggatggggagtcggttagtcattgatagaactactttgaaaacaattcagtggtcttatttttgggtgatttttcaaaaaatgtagaattcattttgtagtaaagtagtttattttttttaatttcaagtgatgtaatttaaaacctaagttgtgtttcaaaacagcaacaaaactgtattgtattttttttgctgtaattaactgtataatgtaaacctaattattttatcatggtttaaattttttgcatatttgctttatcttatgctgctgatttttttaactgaatttgtaagattttgtttatcaaagcaactattatgtggtgacttgcctatatcatgaattatttaagatttttatagttttttttaattagaatttatttcagatgttttgttcatgatactatccttcagggttatgtgcttatcaatgaaataaccccagaggagtgagggaaaataacttgtagccagttatattcaggaataactactgtaaatgatgaacgtgttaggagacctccaatatttgctacttgccaatcctaatttagttacaagaattggtaggcaatcctacttaattttggcaaaagccccgtcatctaaatggcagaataactcagagcatgtctttgaagatgctgggcgtctaccaccaccttatgtccccaccctacccaacaaaaataagtaaaaagaatatggtgtattctacaaatttgtggcatgctcaaagtttatgatcacataaaggcaagaggatacttcatgaataatacatttcaatgcaaataaacagatggttcacttctactagctatgagcctgtttttgtatacactgagttaatctactcaggctgtaggtcccagcaatgttctagagtctggtctttccctttcctgcagcttcgggtccttggacctttcctgtttcctattacttggagtgtctgtcagttgagcaccagttgttctggtgtttcatttgattctacttgtagcataatcatttatacgagctattgggaggttccaaaccctacctagatttgtgtaggtgatgtatcaaatgagcaatataccgttcatctgaaaatagtagcacacagccatatataggatatcattttctaaggactgtttcttcacattgagcagagcaggcataaatggtggttatttagtctaagtcttttatttttttatacctgattttcaacataacacgcaatgtggatgtcgagtagtgttaagaatggtgctgctcctgacaagtgtatgttaactgtttacattttctatctgtagaattatttctctattactgaacttttcctaagtaaaatgtctttgaagtctcgttatttctgaaatacgttgtctgtaatagacccaggcaccttttaaattatctctggaacaagagggatttcatgtaatgaactaggaaatgcatactcacataagcaacaaggttctaggcagaaagccccttggaatttgtgaccaacaggagcaagaacaggtgcggctcaacatgcaatgtctgaaaatttgcttggcattttattcatatatttagtgcaaaattatttttgagtgagatattttacatcactgttaatgtgcaatatttaagattaaaatacattagcttttttatatactttgaagtagcaagtttgttttcgatggcttagagtcatgatttccagcttcccagcctttttatcagtcccttttctaatacaacaaggtgcattaatttgattaggcaaattagagttctaagacacttcttgaattgtagacagaaaatattggattcacaatttcagcagaaatttgagaatgagtgtgtttatattaatttcacaattagctgtattttctgtagcatagattatgtcactgttgcactttcacagcagacatgctttcagaaggttctcatattttatgtttgattgctgataagccatctctattgatacagattttggttaagtaaggaaaaccaggtgtgtgtctgtatcatttattgtaaatgccagctgccacttgccaaccatcatgttcagttcaattcaaagaaaacaaactctcattacttagtgtaaactaaaatacttaacaaattatatcctaaaaacaaggtctctttgttaaatgttgcatgccctaggttttaaattactacatccaaatacagttttcgtcttaaatttgttaagctaaatatatgttggttctttttattttggaatcctttaagcatcttaaacattttttttttgaagagaagttacaaataacatttctatcaggtagtacttgtatgaaaccacctttcttattctataattttgatttttcaattttatatacttaatatactcactgtcttactatcagaaagttattttgaccaagatttttattatcttcatagattcagaaagagatgctaattctgtaccaatgtcttcctggttactattctcttccctctaatatatactggccatttgtaaaaccattgtgttgttgggatcacttagttatactatacgcagatagagcatctcaactctgtcatagtgtttgctgaacagttttcagtgtcatgcacctttggctgctaattgttcctgacgtgcactcttccgagttggtaaaggcacagtgtgttcatgccagacttctaagagaaacaccagcctcttaaatcagaagcctacacacaacccccttaacaatccaaagaagcttgatggtgtgcaaagaagcatcctgccagccttgtcattgttctgttctatgctaatcctgctgtgttgtctaaaagatggagggaagaggacatcagtgtctgatagtgaaatcatcagcaggaaagtgaagctctttccttggttacagataagacttggtttacactattggccagtatctgctaaacatatgaagacttaactattcagtgttgcctaggcattcgcctgcacaacattttgaggttagaacatagaatattttcagaaatactgttgtagtttgtgagtgttgttcattagttacacattagctatagagtggatgcatgaagccccatgacaccagtaaacttctcttaccagtaggtaaaccaaacaccattctgtcattagcagccctcttaaatgttgcctctccgtatcctgttgcatttttgtgtgcattgtgtttctactgatctctcttaggtttttacggaatcaaaggaaactaatttttccttaatagcaagaaagatgaagaggtaaagggcattgaagcagaaatgtatagtttggggtacgattagaaaactcgtaaggaaaacagaagtcctaatttcaaactgactgctcttcgttaagtgctcttaaggagagtctagtaacagtaacactttctggccatttctagtttagattctcttcgttactgaaacttttgagaaatattacctgtggattaattttgcacaatgttctattctcataatgacttacaaattaaactaggtttttattgaactacctcacactaattttctatgctttcccaagtaagctgttgccctgttagatctttactgagtgaattataaatgtgtgttaaatactttctagccaatgttgacacaataccagtaagtatgtaaagtatataccttacatcagtaagagacacgtgtaaaatctttgactgtatgtcttgcaaaattgtgctcgttgacattattactgtttttgtaagtagaaacctgctcgtgatatcggtccatttacattttacaaaaggagtaaatcttagtaaaaattttacgaagaaataaattacttttgtaggcccaatatttggtatatttttgagaagctgttaatcttttagctgaataatgaagttagactgaattacgtgtctccctggactgtgacatctattttctcattacagtttatcctggtcagcagggtgtcacacctggaaacctgagtatgatagctgacatttgcttttctccctctgcgatgtcattcctcctccattcctctccttccctgtgttccgttccctctcctttcctctagacaaaacaaaatggggcactttttagggaatgctgagatcattattgtggtttttcatcattcatgccctagtcattaaacatgcaccactggaatgtaaacaatgttatctagtatgtcaattggttataatattttaaataaaaaagaaaaaagtggtatgaaaattatgaaa

SEQ ID NO: 44 - DNA, 58941 bp, synthetic construct
  source 1..58941: mol_type = other DNA
agaccgggcgccgcggcggcggcagcggcggagaagggagcgggaccggaagggtcgcagcgccccggcgcccctcacacccactgcggcggcggcggcggcggcggcggcggggcggagcggagcggggcgggccggcggcggagccggggccgcggagccaggagtgactagcacgcagcgccgccagtccgcccgcccgccctctccccgtggcgcggcggcggggaggcgaggtgagcccggcgggcgggctaggcctggcggcggctgctcgggccgggcccgcggggaggggcggtgagggaaccgcgcggccgggggcttcggggcgggccgggggctgcggggccctggcagccgcagccgtcgcccctgtgctgggggatgccgcaggcgcccccttccgcccggctgtcagcagccccgggctgcgggcctgctcaccggcctggcccggccgacctgcccgtggggtctgcgggcgccatccctcccggaggtggggcagacagctgcactcctgcgccgggtgcccaggggcccggggtcgcgtccccgcgaccttggccaaggcactgaccctcgctctgccgcggttttgccttcgggaaggtggggaaatgtctcttctggacagggttgttgtcaggctgtgtgaatgtatgcagacgcctgggcaggaccccggtgtgcatctgtggaagactgggcagggtgctggcccgtgctggtgtgagtggtgtaggaaccccctccccacccgcccagcctcccgcctccccgcgcactcctctcttgccttgtcattgcacactcggtgtccagcagtgccagaggggacccagcccgaatcccttaccaccgcgcccctcccccagaagactgctgccccgtcccactcatctcgcccgccttgaacatgccagcccgcatttgccccaggacctttgcatttgctgtttccccgtctttggagttgtctccgtgatcttggcacaagtagctctttctgctccttcctctggtcagatgtctcgttttgggtgaggccctcctcgaccaccctctttcttcccttagtcatgctatttcattatttaaaaaatttccttcctagctctcatctggtttgaaactattctatttatttgcctgcttattttctgtctccccgactaggatgtaactttgtgaaaacaggtagctgtctgatttgtccactgctttatccccagtgcttagaaagcacacaggaagtattcagtagtatcagctcaatgaatgaatgaatgatcaaagaaatggcccagcctgcctgttgtctctgctttatctgttcatttagtgacttctgattagcgtgtgaaacttgtaagcagatggaagcttgttctattttgtgaaacattttggtgtccttgacccctttaattgctaactgttggaacaagctgtgatataaaatctcacatttttataatagtttagctgtagctttcttccacacatacaagagacatttactgaattctgcattatctaggtcatgctttctgctagaccctacggacacaaggcagatagcaacggggtccctttcccgagagagcccaggagcccagtagagaaggcaggcatgcagacacttagttccaggactgtacaacccttgctataggggaggggctatgccatggaaatgtggaggaggtgacaggtggtgctggggggccttgagggtgataagaaatttgctaggcagggagaggcacagaggtgtgaaggagcagggccaaggaaggaccgtaggccactgtggagttgagaatcagtctggagggccaggtgtaaggacacagagtcgtggggaccctaaagaacaggaaccttacccagcagttttctagaagaaggtggaatttggctgggtgccatggctcacgccagtaatttcaagacactttgggaggctgatgtgggaggatcacttcaggccaggagttcaagaccagcctgggcaacgtagcgagatctgtctctacaaaaaattttaagaaattagctaggtgtggtggcatccacctgtagtcctagctgcttgggaggctgaggtggaaggatcccatgagcccaggatttggagcctgcagtgagctatgatcacaccactgtgctccagcctgggtgacagagcaagaccctgtctctaaaaaggaaggcagcactccacatttgttctgatttttaaatgttggcaatagctaattaaatttttttttaatgctgtgagccaagccaaatacagattcattcagcttggttgcaggatcgtcatcctccaggactggctgtgtgggagggaggagctgtgaggagagcaggaaaggtagcctaaggccaggggagccaggccctgtttgcccaggtgccagcccagatactcatttgattgtaactggagccctgtggaaacggaagctcaggagtctaagtagtctgtttcttagcaagcagctggtgagtggagttcgaacccagatcacttcccagataaggattctttcctgggtccctcagctctgagtattctcttttggcttttaacttgttctggaagaatgaccaccaatctatttaatgttttcctccatttaacttttttttttcttcaaaaggatcctgcagagttaaaaacaatactatttttgcatagacttctcttttgacagctttgattttcctggcaatttaattttcagggtgccaggactttaatttgttcacagattaaaatctgtttatttggtcccgtaaataaacaacagaggggatacttgaatgtgtctaagataaaatattcttaattttctggataaagaaaaggaccagacaaaccagttaatagcgagtaaaccagttgttttcatgaggcataagataaaacagagaccagattttttttcttcttgagactattgatttgccaatagggcaactatttttggtctacatacatacagtagttacacctcacacttggttaggaaggtgccatttttacataattttccttcagaataattaattcctgatactttgtacttgattgtatgaaccagtttcaacatcattctttttattttaacttttattatgggaactttcaaacatatacaaaataaacagaatagtgtcctgctttaacagttattaactcctgaccaatcttgtttcatctctaatggtatccacttgcacccttaccacccataattattttcaagcaaatcctaaatatcatgtcatttcattcattattttttgggatactaattacacagtgggtgcccagtaaatgtttggtaaagacaaagctaaatgggagaataaatgtggtagggtagctcggagcagtgggtaagatcaggactttgagtcagactcccagtgggtctgctgcttatctgggtgatgtgcagaagcgattgcactcatctgtaaaacatacgggcacaacctcagggtgctcaggaggtgtacagtagttatacttcacacttcggtaggtctctaaaggtactgactcttttaaagttgaaaaagtaataattgcttaatatcatcaaataactagtcaatattcaaatttccagctgccccatgaattttaggtttccttaatagtttgaaagtagagcaagagaaggccatacgttgttgattggatgatacgtcttttaagtttctcttaatccatagatccccctcctatttctttgttttcttggtagtttatttgttgaagcaatcgagttgttccttagcatttccatagttggtatttgattgattgcatctctgcagtgtaattgaatgtgtttctctgtaatctctgtaagttagtaattggatctagacgaggcttcgtcagatttagggtgcattcctgcatcaagatgccttcctaagtgggctgtgcacttcttatctagaggtaccctgaggctctctgctcgtccgtgttgcagatgagtgcaatcgcttgctgcacatcacccagataaatagcagacccactgggagtctgaagtcaaagtcccgatcttaaccactgctcccagctgccctaccgcattttttctcccatttagctttgtctttaacaaacattttttgggcacccactgtgtaatcagtagaggattgagaaataaatcagacacattttctgcccttacagagtagaagtgtaagtagactcggaatgcaatctaaagcgaatactgggagggtggcaaaaatgggggcatgcccagcatggtttgaagggaaaggctggaggaggaaacatgtaagagaagcaagtgcttgaactagatttttgaaggagggtgaatgttgaccagcaggtcaaaaaggggagggaagtcatttcaagcagatggaacagcttaggcagaggcctgaaggtgtgcagtagctgggtgtgtccgctgatcccaggtggtttgatgttgcctaagattgggccagaggactgccatctcctgtgctgtgctagggaactgaatcttattctccaggcagtcagtcactgttgaaggagttcaaatgggagaatggtgtgatcactgcacactttcaacaaatctctcttttttctttccatattttgaaataattatagattcacaggaagttgcacaaatggcacagagaggtcccagtacccttcccccagctttctcccacggttacatatttacacaactgtagtaaaatgtctaaaccaggacattgggcatcggagcaaggtgtatagagttcattgtcattttttatcgtgtgaaaattcctataaccactaccacaatcaagattcaaaactatgtcatcatcccagatatctccttgtcccacccccttacagccacagcagccccttttccccaccattcataactgctggcaagtactaatctagtctgcatctctatacttttgtcttttcaggaatgttatatgcatggagttatacaggatgtgactttttgagattggcttttttcgttgactatcctgcccctgagatccacccaagttgtggtatgtttcagcagttgctgagtggtattccatggtatgggtatacagcagttagtttaaccatttacccattgaaggacaggtttgggttgtttctagtttggcactattaaaaataaagctgctgtgaacatttgtgtacatattctcacgtggagtgatttctctttctaaagtggcatgtgtgcagtggttcggaagtcacagaaatggtggctgggagaatgcttctgctgtcgctggtccaaggagccacgagaagcccttacccagggccctgggagtgggggattgagagggaaataggcaggcctgggtgcctggaagtggggctggtgacggagatccttgcagggtcctatggatccaacagtgggtgaagtgataaccaaatgctagttgttctgtattgtggtatatactgtggcttaagaactacagaggatggccctgagagctgcaaggttcttgattatcaaagaaagattacgttgttataccaagctattcttcataagaattacagtaggaggccaggcgcggtggctcacgcctgtaatcccagcactttgggaggctgaggcgggcggatcataaggtcaggagatcgagaccatcctggctaacacagtgaaaccccatctctactaaaaatacaaaaattagctgggtgtgctggcgggcgcctgtagtcccagctacttgggaggctgaggcaggagaatggcgtgaacctgggaggcggagcttgcagtgagccgagatcatgccactgcactccagcctgggcgacagagcgagactccgtctcaaaaaaaaaaaaaaagaaaagaaagaataaagaattacagtaggaaaatagaactttttaaatttttactatttttttttttttgagacggagtctcgctctgtcgcccaggctggagtgcaatggtgtgatcttggctcactgcaagctccgcctcccaggttcacgccattctcctgcctcagcctccctagtagctgggactacaggcgcccgccaccacacccggctaattttttgtatttttttagtagagacggagtttcaccatgttagccaggatggtctccgtctcctgacctcgtgatccacacgccacagcctcccaaagtgctgggattacaggtgtgagccaccgcacccggccagatttttactattattattattattattgtttaatatagagttgaagcctcaccatgttgcccaggctggtctggaactcttgggcttaagtgatcctcccaccttcggcctcccacagtgctgggattacaagtgtgagccatcttgcccagctggaaaacagaacaatttaatgaaaaaaatgtcggcagcaagcattgagacagagggtgattgtgagaatctgcttttaatcacaatagttagttgatttaaatatcgcatgtcctgggtactctgaagctttagtgtgatgaaaggttcacttgagtctgtggatcactgaatcgttgtcatcgttagaggaaaaagtgttttggtaggttttggtagggggagtcagcaaggtgaaatgtgcaggactgtgtgctggtcctggccagcccatgtgcaaatagcttcactttctaaagggatatcagaatggtgctttgggaggaacttgaatattgtggtgaaacactcctaaattcaaatctgagccatgctgggaatttggacaacttccttactggacaacttcctctaagcctcagtttcctcatttgcagagcggggatagtaatatgcttctcactagttgttataagggtgttgataaatgtgtacctcagagccaggcccactctcatgcctctagccttatctgcctgaagcccgtcttccatacaagtgtcaaatgatcattctgcagcttttcatttaacatgtgttgtttaatcagtttttaaatgtgaaatatgtacatttgaaaaacagaatagaaagttataatgggaagaaagtttctcatttcccactatttctctacttgccagcattgtgtatgtgcgtgtgtatgcgtgtgtgtgtgtttacgtagctgggcattatgtgttctcttcttcaacttggtgtatttcctttctgtatcttagacatctttccacattgatacataaagtccttgcattctgttgaatggccttgttgtacttctgtgccataatttattcagtccatccacagtgtgcattttagattacttctagttttttgcctgttacaagaagtgttacaaacatgcttgcacaaatatgtttggatacttgtacacgtatttgtcagatacacttagagaattgtgtttgccagtttaggatatgcagttaacatttttattagccagatctatattccatctaaaaaaatgttttaccacttctcagctctcactgacgtgtatgaaagtgcctgtttcctcatgcctcggtcgatactgtgaacaaacttgagctcaggtcttgcctcctccaggaaacctccttgtagcgttccctcccagttttgagttgctcatagcctggaagggaggcagaccctacaaaggctgtgacagtgcagcctggcgggcgctgctgagtgcacaagtggcaaggagggagccctgtgctggacggatggtggcagcacagcctgggagctgagggggaggaaccagcaccggctggtgtgggaagtggaggcagcgaatgcaggctttagtgtattgctaatgtggtttcatgaagaattcttgtacttcccgatttgtaaaactgttttctgagccccagttgatggtccattttgttgaaatatcatctcaatagagttgactcatgaatagctaaattacacaccttctcaggtggccttaagtttctttctcttgctctcacaaagcccaaacttgacagagaaggtggctttaacaggttttcacttaggtgacttttttctcctgcataataagggtaccttattttaattttataattattttaaatctttttgtttgtttgtttttgagatggagtctcgctgtggcccaggctggagtggcacgatctcagctcactgcaatctccacctcccggttcaaatgattctcctgcatcagcctcccaagtagctgggattacaggcacgcactaccacacccggctaatttttgtatttttagtagagatggggcttcaccatgttggccaggctgttctcaaactcctgacctcaagtgattcccccacgttggcctcccaaagtgctgggattacaggtgtgagccaccatgcccggactattttaaatcttgagatggaattacaattctaaaacctaatatgagtgaatatactccccaaatttaaaaaagttaacctaatattgtcatagtccaaatataggttgaaagcagttatagcagggagagttgcagagttggtcagcagggttgagattgatctgtcagtcccaacgtggacacggggtcctgaatggggggtggctctgtgccatgaggtagttaaggaatccagctggtgggcagctttccatctacagcatgtgacttccatctctgggtctgtgacagctgatccctcagccagcagcaaggaagaaagattggagggcaagcagctttctgtaaagaaaaataaaagtgatctggaagttgcatacatcacttctacccacatcttattagtcagaacttggtcatctggccatacctggctgctgggaaagctgccaggcgtcgtctctagttgggcagccatttatctagcaggaaggggaaggaaggcttctcttatgaaagcgaggaagggagggatggatcctggagcacctcagcgcctgtgtcgcacctctgatgttttgacggcttccacagccctcaggactgaggccagacggctctgcgtggcttctggggctcatagtgatctggcctccttttctctctccagcttcactcgccctctacccagcaagtccctagtgacttgtcacattccgaatgtgcctccgcctctgctgcttctcctcccattcccccaaatcttcttcaccctactgggtttaggacccttggtgtgcagggcctcctcctgagtgtgcgctcactgagggcaggcgagtgtcctggcatggtacctcaccatccacagcgggtgctcagtacatgcttgcaagtaactgtgttgctggtgtgttgacggcatagcagaggaacagccaccctccgtaaagcaggtggtagtgggtgcctgcctttttgctgagttgtctctaatcctttgcacttgtaccccgctagccaagctcagcagttcgctgtgtctggacacagtcagtttgagctctgtggctctactgtccatctctggcaaaagagtctgagggcggatgccgcctcctccttgaagccgtccttgtcttctgcccctgccagtgggtaggatctcttttgccttttgattttgtttacattgtgcttatggcccttaccgcactgtgacttgtaatatagataatggactcactgctcgcgcttctcccccaaatagtgaagtacatgttgtttcaagactggttgctagctgactatggcatatcttttgctatacttaccactttcgtgcataaaggtaccccctaaatgttgagtggaattgtttcagcctcttgcaaactgtaaataagctaatctttagaaaggatcttcctttagatatcagtaaaatggagcagcactgtggggaatcagatcaacaaaggtttattgaatgctcacagtgccccaaagaccagcttcctgtcctcctgtccttggagtatgagatgccatgagcaagacagacctgcctcgcacctcctatagcttagagcacagtgacctgccagcctggagagctcctgagtccccttctcacagcagtgtgggctaggcaggtgttccagctcactcagccctagattgctcccaggtaacacgggactgagactcctgcggtgcgggttgtatgagcagctgtttgtccagcatctaagcgctgtggcgtcactggagtcactccctggctggcacgctaacacacctcggcaggagtggtcagagtggcagccacactgcagccaccacccagaggacggggagaagaccgtggggcagtggtcacttggagaaattattaatttgactcagttctttatttagacttgttattaatccattttttccatgtttaaggaaaatcctagcatttgtgttgaaatataaatcatcaccacaaaaatctcattaggttgacgttaaatattagatactagaacataaaggcaagggatttgacagagctgtagaatacattctgtagtcttaaacggtatagaatgtttacctatatgattttattgttggctatgtagttttaaaagaccaaaataaatagcttgctgacttttaaataagcataaccagacacgagcctaggaaccacttgccaatttgtttgcttgttttctgtataaaatcatccaggctcctgcagagcagcagtctcagcctgtgcctcaaccacagaaaagctgctttctgggcctgctggcctacactcagacatagtggatagacttcctagtgttactatgatggactgtcagtcacagcagagttcttcatatacagatctctaccctgaagtccggtggtgatgtgggactctggggctgtgccagctgatgccagctctgggacccacctcctgaggcaggagcacgtgcttgggcacatgcagcacactgatgccaccaggcctctgacagcctgtcactttggcgtatgaatcttgctttttggttcatcatttcaaccagaatctatacactgagcagaagactggtccgtttgcttctctttaggcattctagaagtgatcatttttgaaacaatgcctccgtctctagacagctaggtgtaaatgaaccatttacacctagcttgcccacagggggcaagctgatgagacgcacagagtgatgtagtcttttcatagccagtagtaatgcatacattcttttctccaaaggtggttattttctagtccagccccttaaagtgtggtcttgctgggcctcaaaattccttcctttcataatggtctggtaccactgaaatgtctgcatttttttgtgtcttgcttaagttcagaacttggtcagattgactttatcaacttacagccacattgtcttacataccaataagttcagaactctcttacgtgagctgcgtatgtacttccggtaagaatgcacgttcattctgtttttctttgaagggatctgaaacttgcccacccttcgggatattgcaggacgctgcatcatgagcgacagtaaatgtgacagtcagttttatagtgtgcaagtggcagactcaaccttcactgtcctaaaacgttaccagcagctgaaaccaattggctctggggcccaagggattgtttggtaagtatggtctgttttaatagcgtggattgagtttttgctgtaataaaaagtaaaactaaagtgtcaggatttagaaacattgatgattaaaaaaaaaactctgttataggtttatgagctaaattgaatcaactgcttgctctagttctgtgtagtcaggctgtagggtacaaacccatattcttagaatgctgcaggaatttaaataggtagcaagttttcttttttgtttgtttctttttcctttcattttttttttcatttctcctgtcattatgatatcagagtagtaggtatgacagtgagttgtaacagaaatttggagttttattcatttcttcatcatggccaccttttcccccctccccttttattcccgatcactcctgttcatttccaggcgccatcattgcagtgccttgccattcattggcaggatgaggccagtcagtgtcattgtcactccatggattaaccaggaagggatgctgtgtgaggggttgggctggccatctcttccttggtgtctcacttcaactgtgtgtccagcccagaacgtcagaatcgttagtctgaccctgaacgttagtctcttgcatggtaagacggtcagccgccgcagcatcacgggccagctcaaggtaaagctcttcacatgtttcctagactgcagctatcagcacttcccacactttttaccccttatttttctgggcagaacttttttttttctttttctttttctttttttttggtcaatgaaaacaggattacctttgcgcctaaagaaaccgtggtgcagttaaacatcgcgtgtttacagctggtaggcagagggggttgagggagaagaaagctcttttcgatgctctagtagggtagtttacatttccttgtagagatgttgggtttggagaatctttaacgatgatttttaactgatcctttgttgcggagacctatgatcagggaaacagttgtttttttcagccctggcggctgaaggccctgggagctaagaggaaattgcagtccagagcttctttgagaagctaaggcgggaaagggactgtttggaaggaatgcccagcttgcatctaaagtaatggtgatcttaacttcctgatgacacatgctgtatcggcacttaaatccagtgtgccagaagaagtgttaaaggtggccgggcacggtggctcacgcctgtaatcccagcactttgggaggccaagctgggcagatcacgaggtcaagagatcgagaccatcctggccaacatggtgaaaccccgtctttgctaaaaatacagaaattagccaggtgtggtggcacacacccgtagtcccagctactcgggaggctgaggcaagagaatcgcttgaacctgggagatggaggttgcagtgagccaagatcgcgccactgcactccagcctgggcgatggagcaagactccgtctcaaaaaaaaaaaaaaaaaagttttaaagttagtggaggatggttcaaattaggaaactttgatggtaatggaaagttataaacaacaaagcattcttttggtttataacccatctcctatttggaattagatgataatttgacagataatttgatgtgtgcatgcgagagagagagagaaaaaggagagagggggcaagaagggagaaatgtcggaggtcttggggagttgtttgtggctatagacaggtagctgttttatttatttatttatttttttgagacagagtctcactttgtcaccaggctggagtgcagtggcgcgatctcagctcactgtagcctccgcctcctgggttcaagcagttctcctgcctcagcctcccggtagctgggactacaggcgcacgccaccacacccagctaatttttgtatttttagtagagacagggtttccccatgttggccaggatggtctcgatctcttgacctcatgatccacccaccttggcctcccaaagtgctgggattacaggcatgagccactgcgcccggcctacaggtagctgttttaaatacgtgcttcatttatcccagctggcatgtcattcacttgcttttgaaggttggtagtaatgtgaatagtgtatattgtagaatcaccatgagctctgccataaccctcactggtggtgaatcgaaggactaggaaggctcacttgcttctcccgtctcacggggtgttagtggtaggcctgggaccaaaacaagctgtgggcctttgggaccttattgcctgtaccacggagagacttgttgaagactttgaaccactgatactttgataggtcaaggcctctgacccaccttctgtttagaatcttagtaataatgaacaaatattcactaaacacctattaaacaattttcatttaattgtatttatctctataagacaattgttacattcaagaacagtttcaatttttatagctataactgactttcagttttatggtatccttctatcttatgttctaatagggaaagtaaacactttataagtgattttcgcttccttttcacctttctcttttctctgtatccttcaccaggctatgaggcaccaagtagaattgggaaataatctagttacggcacattcccgtttcaaaaaagaaaaaaaagcttgcttttccaaaaataagctcaacagtagattagctaacactgacaagaggaattggattttctatcatatttcgtattaaaatattggcattatgtagttaattgatgatctgaaacttcctttcatcactattgtacttgaaaatcatctgtcagtgattctttggggagtgtagcatgcagaataatggtcccgcctgagatgtccacgtcctaatccctggaatttgtatatttctttacatggcaaaaggaatttagccggtgtgattacattaatggtcttgagatgggagggttatcccaggtttagttgggtgggtccttcttacaaaagggagacaggaaggtcatagtcagagatgtgatggcagagcgaagtttggagtgatgtggggccacagccaagcaatacaggaagcctccaaccagctgagagaggcagggagcagactccccccagagcctgcagaaggagccacgcagccctgcttacctcttgaggcataagatgcattttggacttctcacctccagaactgtaagatagtaagtttgtgtggctttaaagcagtaaattggtggttacttgttacaatagcaataggaaactaattcacaagcatgtgtatttctacatttttgagaaatataacagcaacagtgtatggtttatgcaactagttaatcttctatttaaattagagctttatgaagggcaggtgtgcagataaaccaacgtgcaggtagggcctgtgacctgtacaggattaaatggaagagctggagccagaagaaaatattctggttcctaattttgaattgtttttatagttgtctttgatttgtttatttgtttttgttcctttaaatatgttagtaaaatttattaggaaataagtttttaaattttaaaatattttattttatttttgagacggagtcttgctctgtcaccaggtggagtgcagtggcgtgatcttggctcaccgcaacctccgcctcgcgggttcaagtgattctcctgcctcagcctcccgagtagctgggattacaggtgtgcgccaccacgcccagctaattttttgtattttagtagagatggggtttcaccatgttggccaggatggtctccatctcttgatctcgtgatctgcccaccttggcctcccaaagtgctgggattgcaggcatgagccaccgcgcctggcctaaaataagttttaaaatataattttgaagtattcataaatatcaactgtgttatagtacaattaaataattgtaagattttgaagctctagtggagaaaatgtatgtacatttctttcatacatatattcagtttttctttctccttcaaaaatctcaagtttggccaaaatagtaaagattatttgctttacgaaaccattctatgaaatgcttaacctttaaaaaagtgttcaatattgagtctggcggttcttagaagtaacagttacagccttaacatgaaataattggtatagcgtgttcctttttgtgtcctcaagttctgtataaacatgagtactggcctgttcttaacatggtttattttctattaatataaataaataaaaacataacaatgttcacaacaaaatttctgtgataaaggagacatggtttgaggcacaggatggctgtgattcagaagacttgagttctgagtccagctcttttcctcagcgaagagttctttgtgagcagggcaaatcagtttctttatgggcctcaatattttcacctgtaaaatgagtggtttggaacttctcatttaagatggtggcccgaacacctgtacaaagataagagggcagtaataagtggaagacagttttaacaaatttatgaaatatagaaagtagcttgaatcttgtgatacagataaaacagcagataaagtgagaataagcagctgaagtatgtgcgtaaggaagagaacctagctatagtaaaactacagaggctgtgggcatagagatgacaatgaagaagagatgaaatgagtggctaaaactagggctgttaattaaaagtgtgcctgtgaaacagctgtgccagttttctgccaacattcccactgtcccccatgctcagcattttcccctagagagctagtaagttagtgaggagttactaggtcaggatctggggaagcacagaagcctagtgaggggagcttcagcatgtggggctgtctttcccttgggggcatttgaaaattctggaaggggctgttgagagagtgttttggactgccctgtggctaggagacagggatgagagtccagggccctctaatattgtgtggcaaacttcttttacttgtgttgggaccaataaaaggctgcttcctagaagtaaaggtaactcagagattggcccttataggcactgccactcagcttcagattatcatctcatttgctgaacttgtatgggggtaaacaaaaattgctagtgcccccaggtacctagtagaaataaatttaaattctttgtggaagaagacagcatcatattagataaaattatttctagatagcaaacagttttatacgtgcaaggcccagtctaggcacacaaggagatatgacaacatgaataaaatcctgcagaaacagcagacaaaagaaacagatccataggagatattggcattattagatccacatttttaaatagctatgatattacgttcaaggtgataaaggcaagattaaaagttttggtggagaaatgaaaacttcttttaagaggaataaatcaaaattctagaagtaaaaactatagtaattgaattatgaatttaatatgtgtaacagcatgctagatataactgaagagagatttagtgacctggaggagaggtcagcaaaaagtatccagaatgaaagctgcagaggcaaaaatggtagaagagcccaaaacagagaaggtgttagttttctattgctgcataacacattaacacaaacttagttgtttaaaacaacacctattgattatctcatagttctatagtcagaaacctgggtgggtttgcctgggttctttgcccagcatctcacaaagctgaagtcaagatttcgactgggctgggctcagctcacagatggaggttctggaagggtatctgcttccaagctccttcagcctgttggcagagtctagttccttacagctttaggtctgtggttcccaatctcttgatctctttcagtcaggcgctgctgtctgctcccagaggctgcatgttttccttctcaagtgacctcctccatcttcaaggcagcagtggcatgcccagtccttcccatactcacatctccctgattttccaccctttccatgagccagagcaaactctgcctttaaagggctctcgtgataagaataggcccacctggataatctgcgttttgttaaattaatgagtacgtttagcccttttgcaagatgcagggtcagtatatgtacccctccccctgcaaaattgcatatttatatactagcagcatatagaaaatgaaaatttgaaaaggataccacttaaaataggataaaaacttttaaattatcatatctggaggaaaaatctaacaatatgaaagacttgtatacaaaaagctaaaaaaattagaaaaaatagagaaaactgaaatcgtggtgggatgtctgattttcagagttagaatatttaataccatgaaggtcatttttcagacttgtctagagtgattgcaatcaaatctcagtcgtcttaaaaaacaaagaaatgaacaaactgattttaaaatttatatgtaaaaataaaaaccctagaatggtcaagacacccattaagaagggaggaacactccctctgcgagatgtgaagacttaccataaaactggtgatcaagctggtgtcgtgtggtgcaaggagaaacagtggactagccctgaaacagagtcatgcatgtgtgggcttctgacttatggcagtggtggcctgtggagcaatgaggaaaggctagccttttaaataaatggacataggaatgttcatgtagaaaaaagtgaaatttgaccccaacctcatattatacacaaaagtgaatgtcagttgaattgctgtaaatatataaggcaagccagtaaagctatttgaacataatataggagaatgtcttcatgatctttggggtagggaaggactcctttaaacacaacataaaaaaacatttatctgctggatgtggtggctcatgcctataattccagcactttgggaggccaaggtgggaggatcgcttgaggccaggagttcaagaccagcctggccaacataatgagactccccccatctccactttaagaaaaaaaaaaattatcatagaagattgatcaattttgtattaaaattaagaaatgttgtttattttaaaaaaccaagatcaagaaactgaaaagataagcatagatgtgagaagatatatgactgaaaaaaaatctcttgttcagaatatgtaaagaacaacagtcaagaagattataaagatagacaaacaaatagtcaataggttgtcacaggaggatacccaaataacctataaacaggaaaagtgctcaatgccgttattcatcaagatagtgcaatttaaaactgcgacgaaataccattccacactcagcagaatggttagaaactaagctgttggtgataccaagtgctggtgaggatgtggaaccacccagaggcagctctcagatgtgacccctcgtgtactggaaccacgcagaggcagctctcagatgtgacccctcgtgcactgctggcagctgtacaaatttgtagaaacgctctggcaaagagtttgacattatctactgaaatacaatggatacgttcccactcttagttgtctactcatcagaaacacatgcataggggatccggagctgcgtacaggaatggtgatgactgtgtgttctgtaatagattgaaaactaaaaacaactgaaatatctatcaacgtaatgtgatatagttatacaaaggaatcttatagcaatgatggaaggagttatagctacatacagcaacaatggatgagtcccataatattgagccacagaagtcagacacagaagatttcaaaaaacaggcaaaaataaactgggagctccagggtgcatgctttagctggtaaagcaagaaagtgattattgtacatgtcaaagcagttatcactggtggacaggagggacactaattagttgggggtgtgagaagcttttgggatacagagagaacatgactgataaatcattgagctgggaaacaaaaaaagaagcaaaggaatcagtacagtatcgggcataagcctcctcactgtcagcactcagtgtggaaatcagtggaaaagtgccttcaaagttctcacagaaaattgattttaaactcagaaaacttattatcaatcaagggtgggggcagagcaataccatctatcttccatgcaccttttctgaggaaattccttgaggatgtactccagcaagagaggcaacacaagagcgtaatgcaagaagcagtggggactgtgaaaagaaatcccaggatggtggctgcatggcaggtcttaaggaagctgcaagaagagtgtctgcaaatcatgtggaggagatgccagacaacaataatgtaagaagctaggaagtgccagtgataggctaaagagtgtctgcaaatcatgtggagtaggtgccacacaacagataatgtgagaagctaagatgtgtcaatgataggctaaaactggcattttttattagtaaaaactaataataatctagaatgtaataaaatctattatttattagaaatgtgtggggaaaactagaaaaaatcatggtctaattatgaaacaaagaggacatgatgtttgagcagttgatgaaatataagagaatcctttgtccttgatcctggaaatagtctcaccctcttatgagtggcagcaagagccatgtgatctttagaaaatgaaatgtaatcccaactctggccgttagtgatatttacattgtacacatacacacctacactccatgtattgattttcaacttctagaaacatcctaaagaagaaatacagaagacttagttatgaatatatggtaaatggaggagaaagggatggaacagtctcattttacgtaagcagaagtcaagacgttcccttcagagttgaagaagcgtgaagattaggggtgttacttaaagacgtaaccagggaaaacccaaaaagcagaacaacaaaaaaaataggaggtgttggcgattggggatttcaaggaagtggccaaatactcagttttcgtaatggggagtaggtgaatcatttctaaagctgataaatgaagagatagtgataacaatgtattctttgagtgaccgcaataaccacaaccaggaataactgaaggtagttcctcatggagctgagctacaagtggggaagcttatgcccacttagatgcttagacttggtccatttgccttgttttagccaaaaacttttttaaaatgacaaataaaaattgtatatatttatcatgtccagcatattgttctgaaatatgtatacattatggactagctaaattgagcgaattaacatatgcattacctcacatactttttaaaagtttctgatgagaacaaatctactctcatcaattttcaagaatacaatacattgttattaactgcagtcaccatatctcacagtagacctcctgaccttattcctcctatctaactgaaattttggacaaaaacttttgataccaaaaaagtgtgtctgttttcaaattctttttttctttttctttttctttttttttttttttgagaccctgggcaacagggtctcagtctgtcacccaggctggggtgcagtggagggatcagtgctcactgcagtctcgacccccggctcaagcagtcctcccacctcagtcccctgagtaactgggtctacagacatgcaccaccacactcagctaatctttgtattttttgtacagacaaggtttcactgtattgcccaggctggtctcaaactcctgggctcaagcgatctgcctgccttggcctcccaaagtgctgggaatacaggcataagccaccacacctggcctattttcaaattcttgagtctgagaagtatataggtataaatacatacatggctacatgtatgtcaatgacttgtttcacaagtggatatatccttctcattttataattcatataaatggtgcaatttgcatatgaacctgtggatttacatatgtatatagacagacacataatatgaactgaattaaagtaaggtagcttcttaaccaaatgctacaacagatagccttcaactttaaaacagattgaattaggttcgagtttggcaaaagcattaatagaagagaataaatgtaaacaatgttataaactcaatggaataaagaaatagaaacagtatttaaatcagtgcttaggttctcaggtggcctttagtagctgttagccctcatgagtagcccagaggtgataatacaaatgatactatttagtaccagtttgaaacctaaaaatgtgtaatcaggctacttgattcttcatgtctattttctggaggaaaatgaacagaatttcaacaggaaacgagatgctggaaacacagcctgtagattttattcttactatagtagtaggaggagatagttctaaaagaactttatatagcagttgcttacgttagagattttgtatcttgaacatttaccatgagctgaaattttggcttcttttctttttagatactgttatttgtgaaaaaaacacagtgattcaaaatttagatttattctcctcatgaattcagccatttcctctactgtgatattccaaaatatacacattttaagacaggaaacagtgactttgtttccaacttcttgtcatgtttaaactgaagatttcatttcttgactggttttatgcactctatattaaattacctggttttgaatgtaatctaaactatgaaaccttggtgtgtgaaggattgctgaaccccatcttaactgtggctgaaatgtgcctctgcaaaggagttagtacatgctgtagtcttagacaactcactctgctcttcatatgtgcaagtaccttgaatgaaataagcagatttttccttgttacttattaaaaagatgatatattcaatgtatattctggcattgctgtattttccaaaaccgttctaatggattgtgcattatatttcctaattctagtgctgcatttgatacagttcttgggataaatgttgcagtcaagaaactaagccgtccttttcagaaccaaactcatgcaaagagagcttatcgtgaacttgtcctcttaaaatgtgtcaatcataaaaatgtaagttatgtatgtattttgtctgtgtgcttccatattgtcaataatgtggtaatcttcagggttttctggagatacattgagttcagacctaggataagctaaggataaaaatggctattaacattggttttttgttttttgtttttttgtttttttgtcgcccaggctggaatgcagtggcgcagtctcggctctctgcaagctccacctcccgggttcatgccattctcttacctcagcctcccaagtagctgggactacaggcgcctgccaccacgcccggctaattttttgtatttttagtagagatggggtttcaccatgttagtcaggatggtcttgatctcctggccccatgatccacctgccttggccttccaaagtgctgggattacaggcgtgagccaccatgcccggcctattttttattgataacattctttttttttggagacggagtctcgctctgtcgcccaggctggagtgcagtggtgggatcttggctcgctgcaagctccacctcccgggttcatgccattttcctgcctcagcctcctgagtagctgggactacaggcgcccgccaccacgcccggctaattttttgtatttttaggagagacagggtttcaccgcgttagccgggatggtctcgatctcctgacctcatggtccgccagcctcagcctcccaaagtgctgggattacaggcgtgagccatggcgcccggctgataaaattcttaataaacattgaggaaatcaaagctagaaagaggcatcattatggtgcataggaatttaggtcacttaaccaaagtaggaatatcaattgatactctgtttctataaaataggaacagtattgatctaacaaattgagaaacaactaaatattttgtggaaagatgttgttctataagtaggtttttaccttgtatatgacacaccagtttcaaatacacgttattagatgatgttacatttagagtagctattcttggaagctccacagaaatcaaagcactaaattttacggagaaataatgtttctagaaaatgaagttgggttcaatcaagcacattgtttgttctcctagtggtcgctgagcattatgttgataacgttgccatgttataaaattacaaaatgttggccgggtgcagtggctcacgcctgtaatcccagcactttaggaggccgaggcgggtggatcatgacgtcaggagatagagaccatcctggctaacatggtgaaaccccatctctactaaaaagtacaaaaaattaaggagggtgaggtgggagaatggcatgaacccgggaggcagagcttgcagtgagctgagatagcaccactgcactccagcctgggcgacagagcgagactccgtctcaaaataaataaataaataaataaataaaatataaaacgtgaaatctggttttttttgttttgtttttttgagacagggtctcattctgtcacccaggttgtgattctcccacctcagccctccaagtagctgggaccataggcgtgcgccaccatgcttggcagtttttaaaattgtttgtagaggtggggtcttaccaccttgtctaggctgatcttaaactcctgagcttccttcttttgagtctgtggcttgagttggtttaaatttctctaatgcatgctttattttactttttcttttttttttttttttttttgagacggagtctcgctctgtcgcccaacctggagggcagtggcgcgatctcagctcactgcaagctccgcctcccaggttcacgccattctcctgcctcagcctcccgagtagccgggactacaggtgcccgccaccacacccagctaattttttgtatttttagtagagacaggggtttcaccatgttagccaggatggtctcgatctcctgacctcgtgatctgcctgcctcggcgtcccaaagtgctgggattacaggcgtgagccaccgcacccggacttgttttacttacttatttaaaaaattttttcaggttacaaaaaatatatattatttttaaaaattcaaacaatataaaaaagtaaaaactcctgaataccgccacccacagattactagcattaacagtttggtgagcattcttatgcatacatgtgcacaagtacataaacaagattaatcgtgttattcttcatcctgcttttctcctcgtgcaatgttggtagacctcatatactttaatgaacatagatatgagccagtttttaaatggttgcatagcacagatgcacagtaatttatttaagagactgccagccgcctgttgttggatagattgttttgtttctcactgttataagcagtgctgcaatgaacattctaacgcctgaatttttgcatactcgtccaggtgaatttcttggccaacattgtcaggtcagagtacacacacttctagtttaaaatatactgacaaattgacctcaaggaagactattagtttgatattttcattaagagtatttgagaagctgggcacggtcacttcacctgtaatcccagctacttgggctgaggcaggagggtcgcttgaagccaggagtttaaggcacacctgggcaacaaaacaagaccccatctcctaaaaaaaaaaaagtatcagccgggcgctgtggctcacacctgtaatcccaacactttgggaggccaaggcaggtggatcacctgagtcatgagtttaagaccacgttggttggccagcgtggtgaaaccccgtctctactaaaaatacaaaaattagctgggcgtagtggtgggcgcctgtaatcccagctcattgggaggctgaggcaggagaatcacttgaacccaggaagcataggttgcagtaagccaagattgcgccattgcactccagcctgggggacaagaatgaaactccatctcaaaaaaaaaaaaaaagtgtctgagaacgtctgttacttcagaatcccccagcactacatactgttgattttttttgttttgcttttgccaatttgataaataaatgatattttatttttattggtgaggttgttacttatttttatgtgttttggtaatttaatttttatggcctttatccatttttcttttggactgctggtctcttctgcatttgtaggagggttttttttttaaatattaaaactattgccctttacttttttttttccatttgacattatttatgttgttgacatactgattttttatcacccattttttgtttcattttaatgtaatcagatctcttaggtttcctgtcatgtttagaaaagattttctacgctaggattatataaatgtttatctatattctgaggttttatttcatgttttagatttaagtctttgttccatttagagtttttcttggtataaagattgaaatatggatgcagttttatttttgtccttagctaaccaatcaccccaatcctgtataatggataattcatctttccctcagtcatctggaatgactgaggttatgtgtttggtgcctaagccgtgggactcgctgtttacaccatgggctgtgtactggttcgttcccgcactgccataaagagatacccaagacagtgtaacttataaaggaaagcggtttaaataactcatagttgcgcatgatgtgggagacctcaggaaacttgcaatcatggcggaagacgaaagggaggcaggcaccttcttcacaaggcggcaggagagagaaaagtaaagagcaaagtgggcagtgctccttagaaaaccatcaggtctcctgagaactcactcactgtcacaagaacagcacgggggaaaccgcccccatgatccagtcacctcccaccaggtctctccctagacacgtggggattatggggattacaattcaagatgagatttgggtggggacacagccaaatcatgtcagggtgccaggatggaggcctgccgcaggatcagctctttaaccctctttaggtaaaaatatgatgctacgaggcctttcactttatcacaccaaaaacaagagcttagccttcatatttcaaacctttttagaaatttgtgcgtagtatttaagttttcagagttaacatactgctttaatgtctttttacctgtaaattctacttttttatgttcaaaaagacattatgtgtttaaattctgtaataattaagttactagggacacataaaagtgatttgattaaaagtgcatctttcctttaattgatgtttaacttttctcaaatgccatgtaattggtaaaagcagtaataataagaagtactgaattctgctgtgatttttttcccgtcttaatgcatttcaatattaaacttaatttttgtaatcaagtaatctgacatattgaagtataattaattttctcttttcagataattagtttgttaaatgtgtttacaccacaaaaaactctagaagaatttcaagatgtgtaagtatcatttttattcagtaatgcactgtacatcaaagaatgaacatctagaaaagacagcaactgctttttatacttaggaaatgtaggtggcaatacattttgtgacatcacagataactttctctgttgcagagaaatatttagaaaatttgatagttatatttaattatttgtaccacatgggttttcatcttcataacagataaaggatgactggaaagaattcttcagagcagaccaggatcactaatgtgttttgctgaactataaaatgtttttctcaaatccctgatagccaggattttagggttcaggagtttatgagtattacttaaaatgattaagtcactaattctatttaagattctgtatttccagaatcttaagtagaatcatcttactaacagtgaaatgaagtattaatctattgagaggcataatgcccaacttcatcctgaatttattggtgtgttcagtcattaacaaatatctgattgccctctgtgtgctgggcactctctgggacttggcctacctggcttccctggagcctgtcagggaagatagacaagccacatgataaatgaggaaagcatgtagtccattagaatgtgctaggtgctgtggacaaagggtggagctgggtcaggggatcaaaagtgctgagggttggacttgaggctgcagttttaaataaggtggctggggaaagacctccatgagttggtgacattcgaagaaagccttgaaggggataaagaagttggtctggccgggtgcggtggctcacgcctataatcccagcactttgggaggccgaggcgggcggatcacgaggtcaggagatcgagaccatcctggctaacacggtgaaaccccgtctctactaaaaatacaaaaaatcagccgggcgtggtggcgggggcctgtagtcccagctactcaggaggctgaggcaggagaatggtgtgaacccgggaggtggagcttgcagtgagccaagatcgcaccactgcactccagccagggcgacagagcaagactctgtctcaaaaaaaaaaaaaaaaagaatttggtgccgcagatactttgggggcaagtagaatggagatagaaggaacagacagcgctcaggacagcagtggatgcccgcctggtgttttccaagaccatcaagaggtggcgtggctagagatgagggagcaggggaagagaagagggtgaacaccacaagcctctaggccgttgtaaggatgtcttttgctctaaggcaagtcagagtaagagtcttagcagagcagtgagctcacctgccttctgtttgaaaagcgtaactctggcatctgggttggtaacccactataaggggtgggggcatggaacatcagttactgctgttgcagcagttctgttaagggatgacggagggtccatttggcccagaggggtaataggaagggtgagaggggaagagactggatgctgaaatggttctaaagatagagccatggtattagctgatagatgagatgtgtggtatgagagagaggaattgagaatgacacctagatttttggcctgagcacctgaaggatgagggagctctcaactgagatgatgaaggctgtgagaagagcagactgggctagggatggaatcaggagttcagttctggagatggctttaagatgcctgttagacatcaaggtggaactgggaatagggaggcagaggaatgagcctggagttcaggagatatgtctgaattgaacgtaggaatttgggagctgatggcctgtaactgagatcactaagaaagtgagtgtggttacagaagagaagagggtcaaggaccagttgctgggtattttgacagcgagaagttagagacaggacagggcagggcccgctgggattataggactggccagtggatttagcagcatggaagacatcagtggcctcgaggaggacagtttcagcagaatggtggctgcacaaacctgatccaagtgggattaagaaaaaaatgggagaaggctgagtgcagtggctcatgcctgtaatcccaacactttggaaggcccgaggtgggcggatcacttgaggtcaggagttcgagaccagcctgggcaacatggcaaaaccccgtctctactaaaaatacaaaaactatccaggcatgatggctgttttttttttttaatttaattttcagttctgggagtccgaggcatgagaatggcttgaacccgggaggtggaggttgcagtgaggcgagatcacgccactgcactccagtctgggtgacagagtgagaccctgtctcaaaaaaatttaaaaaataaaaagaagggagaagaattggagatagcacatgagacacctctttggggagttttgcttgcaaagggagcaaagaatcggggcgttgctaagcggggagtggggtcaagtgtcctttttgttgttgttgtataatcacttttaaaaacgtatatattgtagagcaatttagagccacagcaaaattgagcgggaggtactgagttcctgtctgtctccagccccttacgtgcagagcctcccccgttctcagcatctcccaccagagggtacatgtgttgtgattgatgagcctgtaacagcatggtctttaggctggtacggagaatttcagccaaaaatgtaagaagtaggaaaatttgtgtttgagattctatttaccatgctataaaaggttgttgtttttttttttaatttttaacttgtaagacgttaagtttgttatttatatattctttggaaaatttttagaaagttccattataccaagttatctttttactttagccagtgcagtgattggaagtaagttacagtttcatgaaatttagtcataaaggaactttggataattttcaaataaataactgaccttttctccctcaggtatttggttatggaattaatggatgctaacttatgtcaggttattcacatggagctggatcatgaaagaatgtcctaccttctttaccagatgctttgtggtattaaacatctgcattcagctggtataattcatagagtaagtggtgatgtattaattttatttttaaaaacaatcatttggttgtcataatcctttacatacaaaataacatttaaaaaaaattgttaggcttgaaaatccaaatagatgatggaatcatatggtgttttaagagagtcattctaggaggcatctgtggagccgcctggcctgccaggctagaccagctgctgtggacacagccaggtactgcgctctcagtcagatactgcgcaagaatacattgttttaaacttttcattttaaagtaacttaaaacttagagaaaaatttcaagaataggacagagaacttccaactaccatttatctacattcacctgtttttaatatatttgccatatgtgaaatcccatttttaatgagcaaggaacttaaaggccaagtagtcagtgagacagctgcttgagaactctctttcttaaataatgacccacatatccatttctcttatcctaaaattctgccgtgccagcttccctgcatcactggtgggagtggccagaccctgcaccgcaagggttcagagcaggcctgtgggctcagcagaggccgggatttgaataacagtgtgactgtactgtcaggaaaaacatttaataagctagggagcgataatataattaatataattctctctaagctgattttacaattttttgttattattacttgtacggctgtgtaagcagactatcatgatagatttttttttttcacaatttgataccaatacttcagtagcaaagaaaatgaaataaacttcttcctgccaaaaaacagtacatttttcataaaaaagaaagatggaattgatgtaataggtgaagaacaattaaaacttgtcaaataaggccagtaagaaaaccccaacagttaacaaaatctgttttcaatgacatattacagaacaattaaaaagctacataaaaatcagtgttacctacttattagaaatacattttaattcacctgtagatccaaaaacatttagacatacagacaaaattttgtattaactgacaaaaaaacccacactacctattggattcatgttgcttaaagggtatctacagaattctcacctcaatattttcgtgttaaataaggtggaaatcaacagtccagagatggtcattagaaatgagccactgacaaacacaatatatttataacttgtataacatttcattcatgtgcatgttttgagcattgtggaatatttaatttgcatcaggctttccaaattccttaaatttataagatttgttctcagtgggagttctcagatgacttttgaaataattattaaaatgaaaatttatttgcaaactactagggtttagatacagaataccttcttgtatttaaagatccatctccagtttgcatacatcatgtctttcaatgtgccggagagaaacaaaggcatccccacgttctttacatttatagggttttttagaaatgagttcttttatgtcttcaagtagaactggaaagactgaagacactaccacattgtttacatgcatagaatttttcctcagtagtagttttgtttcgtattttcaaagggaaatggaagagttccatgtgctttttaatgtgctcagaggtaactggaacatataaaggcatcatcacattcctcatatgcatgttatgtaaattatacggttttcctccagtataatttctttcatgttttcaaagataactgaattaactgaatgttttccccaaatccttacattctcaggatttctacagagtatgagttttttcatgtttacatacaggactggaatatctaaaggctttgccacatgccttacagtcatagggtttctctccagtttgagttctttcatgtttacatagagaactggaatatctgaagacttcaccacattgcaagtctgaagacttgaccacattccttatagtcaaagggtttctctccagtatgagatttttcatgtttacctagagaactggaatgtctggagacttgaccacattccttacagtcaaagggtttctctccagtgtgaaatttttcatgtttacatagagaactggaatgtctgaagacttgaccacatcccttacagtcaaagggtttctctccagtgtgagttcttccgtgtttacatagagaactggaatgtctgaagacttgaccacattccttacagtcaaagggtttctctccagtgtgagatttttcatgtttacatagagaattggaatgtctgaagacttgaccacatcccttacggtcaaagggtttctctccagtgtgagttctttcatgtttacgtagagaactggaatgtctgaagacttgaccacattccttacagtcaaagggttcctctccagtgtgagttctttcatgtttacatagagaactggaatgtctaaagacttgaccacattccttacagtcaaagggtgcctctccagtgtgagttctttcatgtttacttagagaactgaaatgtctaaagacttgaccacattccttacagtcaaagggtttctctctggtatgagatttttcatgtgttcaaagggagctggaatgcctgaaggtgttaccacattttttttttttttttgaaacagagtcttgctctgttgcccaggctggagtgcagtggtgtgatcttggctcactgcaacctccacctcccaggttcaagcagttctcctgtctcagcctcccaagtagctgggattacaggcacctgccaccaaatttggctatttttttttttttttttttttttagtagagacaggatttcaccatgttggccaggctggtctcgaactgctgacctcatgatctgcctgcctcagcctcccaaagtgctgggattacaggtgtgagccactgcgcccagccacattttttatattcataaggtttctctccagtatgagttctctcatgtgtttggaggtaactgaaccgactgaagcctttatcccatttttgacattcattgggtttctctccagtatgagttctttcatgtcttctaagggaactgtgttgactgaaggctttgccacattttttacagttataggatttctctccaatatgtgttctttgatgtcttcacatggagcggggatgactgaaggctttgctacatttcttacatttatagggtttctctccagtattatttcttttatgtttctgaatggaactggaaagagtgagtcttttaccatatttcttaaacacatggaagatttttcacattgtgagctctttatgtctttgaaagtaactacaaaaactgaatcgtttcccacatttcctacattcacggggtttctcttcagcatgagcacctttatggttatgaaggtaaccagaatgtccaaaggctttctcacatttctgacatttataaggtttttccccactgtgagttcttttatgtttttgaaaataactgcaaaatctcaaggctttaccacctttcttccattcacagggtttttctccgttgtaaattactttgtgtctttgaagtaaatagagaaacttaaatgtcttcccacatttcttacatttatgaggcctgttaccagtgtgtgttaccatgtgtctttggacatttgtgagagaaatgaaggttttctcacattgtttacatttgtatggcttcaccccacgtttctcccatgcatgtagtttgtgtccagaatgagataagatgtgcctattaagggatgaaggacatgtgaagacttgtccacacactctgcattcacatgaatttacatcagcagaaattttcttcttcaggttcagatttggaatctggccgaatatttctccacaatgactaccttctttacattcacagagtctttctcccataggacttcataaattttttccagaattattgaaatgactttcactgttctggtcttcccatttgtttccatttcctggcttccaggattctatggcatcctgcttagggatctccaaggtcacagggtgacagtctgtggcagagccacctagggcctcctggcccgaattttttctaaaaaacaattaaaatactgagtgagactagaggcagagataatataattttatcggaaatagatattcttagcattccctggattattactatactaattttatcaacagattgccattagattttatgttccaacagcaagaggtcatctttttgctgaactgaaatctgtggggaagaagctagtgagagacaagaacagcagagcctgttactacagaaataagcagatgggttttagatggtggagtggtaataattttttcagatctcttttgccaggaaagattggttccatcacagccattgaaggcctcccttgggggtagagcccaccgacccacagagggcagggttgtctcgtctcaagcctcaggtctgtggcccaagggcagcgtcagggatagctcttgtcctcccagggctagctgacagcctcccatctgccatctagtgtactgttttttaaaatagaacctttgctgccatcagatggtcagttaaaataatatattggtgactttgctttaaaaatagtaacactaggcttctgaattaaagatctcctgatgtaccattctatttctgttcctgaagtttccacagaccttcatataatttaaggtactcttgatatctcttaaatacattttatttatgctttagaataatttcccagattattagtcttactacattaggccttattcattttataaggggaaatggtttgtctgacttgttcccccttgggccccaaggtaagtgggaaacaatggcctcctgtcactgggggctttgtgagagctgcagcgtcggcaggccttttttatggaatagccggtgcctgcagcctgagtcagatggggcccaaaggagtgtttggtttgcccagcacgaggtatagaaacctaagaagccttcagaaaatggccctgttgccatccctgcctcctgctcaccatccccacccacctggcatcttgctgtgtcctctcctccctgtcaccttgttccctgctgcttcccacatccatggccttgccaggctctccccacatctgtgtccatgtgggagagtgatgcatgctcactgtggggaagttccaaacattgcacaggtgtataaagcaaagggggaaactccctcttgccccctgcccccctgccccacccctgcccacatcccaggaagggaggagccctaagttaactgttctgtgtggactgcaccatcctttgttccatctacagtaccatgcacagagatagacacacttttaattttgcctattaaaatggtttaatacaaaacataaattttaagtatttgaaagataaagttttgcccatgatatcccaccgaagtatatactttatataattcaaaaaatgaaatgcaagtaacccagccctctgttagcacctggagatggccagtgagagcacgctggtgcatgtcctgcctcactctgcatggcacctctctgttgactgatgttaacaccagcatatctgtacttatgtccttttgaacttacatccttcaaagacaggatcaccttgcatataactgcgtagcaacttcctaaacaggtagcttggtttgtttttttaaatcaaggatcaaatatttctataaatatttatgaaaaacagatacctccacctctccctttatttctctctccctagaagcaaactccttcagttcatttagctgattattttggtctctatttccatattgaaataatatgcttagctctttcttcattgatcctttctcagtttggggcataagatgctgatttagcttcttaccaacccagccctcaccctcggccttcctcgccctcctcccaggctggtggatgtgatggtgtttggctcgttgcgtcatcgtgagcgtgtaaatgctttgcacagcagaccttcccctttcaccttttgttccctggagttaacaaacacttatactctatttgtgtgaggtttttgtttgttttggggggtagtttctgtgttcttggtggtaattcaaccctaactcttccatcaggcatctgaattttctctcagcacatgtagatgtcttgggtatttcatcagtttcatcttctcaggaacctctcccaagcctcagccctgttcccctttgcactggctgccactgcacctgctcgaaggggctgtcctggatctcccttggtgattttgtgggggtttccttcatctgcctcccatgttggattccttgcttgctgtccttgtctctcagattacccccttgttttggtgggacgcatcctccaaaagcttcctaaattgccacaggggagagaaattttttgaggcctcaaatgtctgaaactctttattctgccctctcacatgatgagtagtgtggttgtgtgtagatgtgtgtagaattcttagttacagatcagttgcgctcagaatggcggaggcagtgcctgtggtagcaaggcatctagcatggctccggagtttcttagtgccatctgatgtttttttagatggagtctcgctctgtcgcccaggctggagtgcagtggcatggtcttggctcagtgcaaactctgcctctcgggttcacgccattctcctgcctcagcctccctagtggctaggactgcaggcgtccgccaccacgcccagctaattttttgtatttttagtagagacagggtttcaccttgttacccaggatggtctcgatctcctgacctcgtgatccgcccgcctcggcctcccaaagtgctggattacaggcatgagccactgtgcctggctgatgactaaccttttttaagtgctgtggttttgggttttggtttggttttatctctggaaacttttaaactcagttatttattccttgtattctgagatgttttgatgtatgccttgatgtgggcattttttctttagttttgctgggcacttggccttcagtctggaagcacatattatagaggtctgagaaatttatatcatttctttcagaatgtcctcttaactccattctttattctttttctctgaagcacgagttaattgacactcatttgctcttaaaagttcctttttacagcattctgttcttgttgcatgtatatactatcatctctgaggataagcttttgttgaagggttttatcactccctgcattgtctttctctactgagagttccctttttagtgtgttaggtccctccctgtcacacgcaaggctttccccaaatgtctggttggatcatgtttaagattgaaacattaggccaagcacggtggctcatgccagtaatcccagcactttgggagactgaggcgggcagatcacctgaggtcaagagttcgacaccagcctggtcaacatggtgaaactctgtctctactaaaaatataaaaattagctgggcgtggtggcaggtgcctataatcccagctagtcaggagactgaggcaggagaatttcttgaacccaggaagcggaggttgcagtgagctgagatagtgccattgcactccagcctgagcaacaagatcgagacttcgtctcaaaaaaaaaaaaaaaaaaaagagattgaagcattaaaggctgactggaagtactgagtgaatgggtaaattgttaaagaatgggtgtctcttggaccacaggcagccacaggtgtcaccttctgtaggttttttctctgggcaccatttaatttctctggaaaaggccccttcagtcccttggtggagggatgtaagcctggctgctggggtacagggctgtgcttctcatgtggcagagcgcaaactcaccaggcagccctgttgcaggcaggcctcaccgtgccttccctgttggtacccacaggactgtgcatgcggcgcctgtggccctgcacctggaagctgggcatcagtttctctgcgtgaagggccagcaggagtgaggaaggagtggagcctcacttctgggatggagatggggatctgggacatctactacgtacttggactttcaataaaatgaaaacttctccaagtgctacccttgcctcttctgcctccatagcacctgcatttcacttgctgagcctttcctgggtgtcgtggccatttatagaggttggcatttccttcgctcagctagggcatttgggcggccctgcagcttcctgtccctgtagcgtggggcttttcgtgggcggcttccgcatgccacggtgggttagacaggcgagggactggccgggaggaggcctgtgcgagaaggaagggggagcagccagaggaggcagcaaatgctagctgaacgtagtgcagtcctggcccctcagaggcctggtccagactgcggtgcagctctgagggcctccggtgtcacacaggaacgggcctgcctcagcatccctgcccggtcggcccctggctgacggctctgtgggaggtgtgccctggcagggacagagggtaggtgcagacaccacactgggccatctgtcactctcactcctgtggcgggagaccaaggagtgcatttccgtggaccccacagtccaccctggccccctcagctctacttctccacataagttgggaatggctttcctgtggcgcccatggttctctcttcctcaggggaaatctggaagacagaggttagtgggacaccctgtagtccctgtcactgtggtctctctgctggctctttccctaccctttcctgttattcataccctcagctctcacattggcaggcctctgtggcttgcctggcctgtgtcccaggccttcattcctgagccgtctgtgtctggtggctctcagtgggccacagggtcccaggccacccagtggccgtctccccagtcctcagtgtgtagccggagcggaggcgcttggcaggtggagtaacgcccacacgagttccttggcctgtgagtaagagtcgtcacagtgggaaggccaaatggaaacctgaaactgcccccaagatagtaaatcaaaaacaagatcacaccctgcagggcccggggtgggtggaggagactagggccaccatggaagcctcaggggagcagagacagtggtatcttgcatcccagtctaactcgttagtccagcccttgaagaagctgcatggattctggagaatgaccccagacggccacaggcttacggcactggcagtcctggccgcagctgctgtgcatgtcaaggtgcagttgttgctggagcagattaataaggcctcaggtctggcatgttgatggggcaaatgcatcctccacactgattagaagagaggcccagacagcgcccacactgctgcaggctggacagcaatgttctctcacagccttgctctaagcctttgctaacgttcccaccctcccataacatggccgcaagagacctggcccagacttcacttatgccctgacccctgacccctgaccccacgaaccctgcaagtggaggagccctgagagtgtttggggtcttcgggtttcagtgtctacttagagctgtgtccattcatcctcaagagtgcctggctgttcttacccggtgggtggccacaggtacctgtggggaaggaccggcaaggccagacagtggacacctgtcatgatgtgctccttcctgggatacctctcaagcagtgggtctggatcccagagttgagcgggcagtgggggaggtcagcacctgccccactcatgctgcgggtgctgtgggtaccctcactgctgcccacagggtagcgttgggttccaggcattttgggagccaagccccgatccaggcgtcacttggatctgtacttggcatttgtcttctttgttctgagtgattttcaagacttgaaggggcagaactgtctttcctctgctgtcttgaaattgaagtgaggtgttgggaagctgcctcaggttgtatttcgggggtgactagagagggtcccagggtgcggggagagcacctccttagccacctccccattggccacacagagcacccacacaagcttgggactttatcaccacagtcttccagcagacggcagtaaagtgtgcttttcctgttaaattagtatgtgatgacagttttttgacagatggcagtgtcttcagatgagcgtgtttctggcgcactggggttcacagagctggcaggcagcccgtggagatggttccactgctgcgtctgtccttggtagaaccaggctgtccttgtcttccttgctcctgcggccgtgctgttagttctgggtgggctgggcttcagggcctgctggctggggaagtgtgtgcatttcacacctcagaaatcagcctcctggagagaaagtgcccactgcacaccctctgtggcctgaggaagcgcctgtttctgcttctcccgccagcaccgagtctgcttgctttccatcgctgccaagtgatagactaaaaatgggcattcattttgggtttttaaagaagatttttgtgagattgagcattattttatctgttagtaatttatgttctaaaatgcctgttcttgtcatactctttgattttaaaaaaggaaacaagaagcgaattcgttcatttggtcttagctccctgacttggtcctcacagcggagcgtccctggttgaatgtgggctgcttctccctggctttccttcatgcagggaggcagcccggtttcttcctctcaggcctttctgggaaccgggggtgtctgcacagtactctaaggtggaatggaggggctgggggcctctttttggggccaggtagagattgtgactgcatttttaaacattatatgtttatcatttaaatcttacagaatctaggaagcctagaaacaggtcacttagcagcatggcagtgtaattgtacctgttgtcaatgtcgaaatggcttcctgcttgccctgatgacagccccacagccttcactgaggcatgccgcctgcaaccccccttgtggcccatcagttggggtgtcttacaggcaggtgctaggcagtgctactgaacctgcaacttcctgggtaaagtatcctcatgccttacgccatgtcagtggcttggcagtttgacattgcaggtgcactactcttgtgaaaagaatgggtgtgggttgtttacaagtcacagtttctcaagtgagtttgcaggccgaagtccccaggcaaaagtcaaattcctaaggcctgaggaaggggctagggtggaggatcagcaggaagaaaatcccttagttatgagggaaaaggttgcagaagttgtgttaaggctttgcaagtcaggtggaatatgatgcatgtcttcattctgcagacacttcccaagtgtctgctcgcgccaggcgtgcttctgagtgctgagagctcacacagagtcagcactggggagggaagagaggtggcaaccagaacatgagcaggtgagtttttgtgccacgtacagatggagacagcagcaccagtgctggcgtgtctttgtggcgaaggtgagaagattggaggtggatgatcatggaattgctcttccaaggagagaaagagccatgggaagattccaggatcagacgattctagacctgtgctgtccagtatggcagccactaaccacaggaggctgtggagcactcaggatgtggccgtgctgcagttgtaaaatacatactggacttcaaaggctcagtactaaaaagagaatgtaaaatatctcagtatttttcttatgttgattacattttgaaatgataatattatggatatattgggttaaaaaaatatactgtatgattaaaattaatttcacctatttctgcatgctgttgagcatggctagtagaaaatgtaaattatacacatcgttcgcattatatgacattgtctgtgggacagcactgccctggactgacagacagcatgaggaccttagcaagagagagtcagagtattggggaactcaagtccaggcgtggagagcaggagggggccgtgtgtgctggactgacagcatgaggaccttagcaagagagagtcagagtattggggaactcaagtccaggcgtggagagcgggaggggggcatgtgtgctggacgtgtagatgcatggatggagggtagataggacagcctgagggcctgcgagaccacagaaagggcaaatgggggccatgaaggtttccactgggggtaaggggcaccatctgacggctttaggctgatttgttttagtttcaatttgagagtaagattttccaaagttgttcccaaatctcagagttcagttcactccctacactctcacactggcttcacgaccctcacggatgtgaagtagtttatttagcatgcttcattcattttactaatttaagccatttctttcctaggatttgaagcctagcaacattgttgtgaaatcagactgcaccctgaagatccttgactttggcctggcccggacagcgtgcactaacttcatgatgaccccttacgtggtgacacggtactaccgggcgcccgaagtcatcctgggtatgggctacaaagagaacggtgagtatagccggggctggaagaggctgggatgtttagaaattgctctagcggtggtctcgagttttttctctttcctttgaaccatatgatatatactgtggggactgttacacccagaatatagcatgatccagagataagaaataattaattgtgtttttccattggttaaaatcattctcttttaaaaattcacttttaaaattgttatttttgaactttttaatcagagttaagctgtctatagccaagtgtgcaaatcctgagtgtgcagctcagctgaggtgagcacacccacagcagcagcagctctggcctccccatggcccctcctcgcagcccacgaggctggccaatctcctgatctccagtaccatggatcagctttatttgttggtctgcatattgtttttttgaatttgatgtaaatagaataacacatgttttcatgtaaaattggtgtctttttacatcaaaacttagcttattctagcaatatcagagctctttgaaacttggcttttagcaaatttgttgaaaataacgaaatcacgcttacttatttttaaaaagactgaaagtttgcccgggtcatctgaaatgagttttgctacaggttcatcttgctgcgttgtagcttgtgttcccaccctgaggggcacagcttcatgtgcttcctgtggaggggagagaaaacttgatcccctgttcacttctcccctcggcccgccagcagggcacttagaggcctctgctgtctgtctgaggccccacagatgagggtgggcaccgtggaagtctgggcccctctagcagggcctcacctgcagtcctgcaagccagccagcctgtgccgccagtgagtgctgctgcctttctgacggggcagtctagaaaatgatcgctcaggaggtgtggtatcaacaacgcacagaggctcccgccggcaagctagtgacgtgtaccgggtttgtcctgggagggggtttgaagaaaaaagatgggggactctagctggtttttaatcccctggtgtttggtagtggacatctggtctgtcgggtgcatcatggcagaaatggtcctccataaagtcctgttcccgggaagagactgtatccttcacaggggacccggtacttggccatggaggctggggtgggcgtgtggccctgaaaagctttgtgttcacaggcacttcttgtttctggttttttgtttgtttgtttgtttgttttaagctataaagtattggactctttggcactaaaaccccagattgctacaaaccgaaggctaaaatagaggtcagcaatcattcatattgtgtaaaatgtcacccttagctagcaatttatttttccatatttgtgtgtttagtgcactgttagaattccttttcctcacttttgttttgttcatggcacttcataattttatcatttcattttattttcagttgatatctggtcagtgggttgcatcatgggagagctggtgaaaggttgtgtgatattccaaggcactgaccgtatccttccccgcgaccttggccccgccatgctttcttaatgcctcaggcagcatgaccacctgcttacacgagcgctcacgaggacaaagtcgtaaaatccactccagactgtgttctaaggggggctttactgtatttgttaattagtgtcacaagccaagtggttcaatttcattctttatttttaacttgactacctgtgatgactttgagacttagagttcagttaaaccgattatattagctcttaattttgccaaaaatagctggacacatagaagaaattatttactctttgataagtatattctgatatttaaatgaaaatactgtattatttagtttattccgttaatttaactaggaaagatgctatctaaatttaataggctagtgtgcttgtgtgctttaattaagtactattttgttagttactggtatgcattgaaatattttcccccaaagtaagaactgaagcacattacaaaggacctaagtgaaagagattaaaatgaaaattttgtgaggaacaatatgttaaactttcttgtttgttactgtgctgacattttgtagaattttttttaaaaatctgtctagtgggttattttgtgacacactggggaagtcaaaataaatgtaaaatgaaagagataaactcatactgtagtcagcaagtcatgttagagatacagcagaaaggagaataactactctaattgttacaatagccttctttcctcatttgccattcttccatcctcagtattttttaccctaacatggttcttcacatcttccctttttcatttgtgttttaaccacttagtttttcattagtctttgactttgttttcgttatgaaagtttaaattggtctccatccttgggcagattgatggttgcttttaaggaaatcaagctccatagtcagtgttttgtatgtatcttaggaaaataatttcagattttaataattttatcaaagtggtctccttataaattcttcacagtgcaaacttaaagtgaaaatatttttatttctctcattttatttacctttctttacattttctatatcatagattatataatatgtcaagttattttatttgttctactaaattttctagcagtttccatagcctcatctcagattcacttgttgcaacctataaataaggacgtctttattttgcaagtaaacttaattaaaaagggaaaagttgaaaaattaaaagactaataatttagaaatatctacttaatgttcagtttgtctcaattcttactcattttgtgccattccttgttttattacaaaatgttttcttcaaaaagtacaaaaatgaaaaatgtgagtactttttggtgcattttagtaagtaaaattaaaattcctgctatacatatgaacattaatgtcagtaattaatagtgttatatataaggttacctaatgttattcccaaaagccacacagagtttaacatcattttctaaagaaaattttgccaactctttcaaatattagattgaaatttgggagatagaaaaaagttgcagaaatcagactgagggtctcagagatttgctttaatttgcgacccagggtagaaaaggaactcctgtccctgcggtggtctatgagaaagagaaagctttagcccggccacctcgggccccagctcagactcctccccttggcagccatgcatccttgagaaatttagggcctctctgagccttggtttccccttctgtaaaatagacctgtggtctgcctgcagcttcacgagagttagacaacagggtccactgggcttgtcggaattattgttccccttcccccgtccctctcatctgtcccccatccctcccacctgtaggatgctggggtggagtcctctcggggaatctgtgggtctcctctcacaactggtttaatttctagtcctttatcattaacccagcagatatttctctcacctgcccatttctgggtgcctagtctgactgagatgcaaagaggctcctcccagctgctgaattgagggtggatcgtcaagggcagggcagagcaggagaacagagcagaggctgccatcatccagaggagaggtggaggcccccagcaggcgggtaggggtgtggccggggagatgggcttgtactctgctttgaagctggacccttcaaggagccttgctagggtttggagatgtctgttagacagtggaatttaggggcaaggtctgggatagagagatcaaagtgggtgtcatccgtctgtcggtagccttgaagcctaggactggtagcgagcacttgcaggggaggaagagaccaggacccgggacttagcccccttgaggtggagggacaaagggaatagggaaggaaatggagaaggcactcacgtgacccctcctcctagagtgtggtgactgagggaggctcattcacatgaggagatgaggacgggggattggcccctgggccttgtgatggctgctggcagccatgatgggcacagcatttatggagtggagggaagaaagcctgatgggagtatgtttgagagaaaatgagaggctgggaattagagacacaagtgtagacagctcttttttctttccttttttttttttttttttcctttgagacagagtctcactccattgcccaggctggagggcagcgatgcgatctcagctcactgcaacctctacctcctgggttcaagcgattcttctgcctcagcctcccgagtagctgggattacaggcgcccgccaccacgcctggctaatttttgtatttttagtagggccagggtttcaccgtcttggccaggctggtcttgaacacctgaccttgtgatccacctgcctcggcctcccaaagtgccgggattacaggtgtgagccactgagcccgaccgacagctctttatggaagtttttgctgcaaataggaataagaaataaagcgataggtagggccaaaggaaagcagctactgtgttaacataggagaaaacaccatcatttaccaacgtggtggaatgtattggtagagtgcaaaatgtcgatgatgttggagaaggaagagttgagggagcttgtccttgagtcaggggggttagggtctagagctgagcaggcttagtgtagccgggagcccagatggttgctgtgtggcaaatggcacacagatgctgggtgggtgcatcctgggaagtctgtgggagtgagcaggcagaagaggtatcaaaagtataaggtgggctgggcgcagtggctcacacctataatcccagcactttgggaggccgaggcaggcagatcacttgaggccaggaattccagaccagcctggccaacatggcgaaaccccatctctactaaaaataacaaaaattagccgaccgttatggcaggtgcctgtagtcccagctacttgggaggctgaggcacgagaattacttgagcccgggaggtggaggttgcagtcagccgagatcatgccactgcactccagcctgggcgacagagcgagactctgtctttatttatatatgtatatatggcagaaggaaaaggtgtgagacagttttcacattttggctaaataggtaaataaaatgtgggcataattctgatttgacaatatgtatgaaccaggagtaggaaggagaatttgctagtgaattgaatgccagaaacacatttcctgagcgggtcttttggaagtataacattttggaagaactgagttcatgtaccagttccctaggttatttcatggtgatgtaagttcatttttctaagacatgcctcagtgagcacttttttaagctgctgttgatgctatttttttctcacttgcattctcttgtatagcgagtacagtttcagtgtcactttcccacatgtaatcctaattatcccaagcctaacaagcaccctgtggaataggcaaagctggtaatgtctgcattgaacaaataaggaaacagaccccaaggaagcctgactttcctgacacactgagtgtttaatgcagagttgagtctgaaacccaggtcacgcactttgaaaggaaataaaatgcattacctagggatcgcagtgatggttgggaagagtcagttccaagtaaaatagagcatcatttgaaagctgtcgctgggctcagtctaagcccagttgcttggttcccagctgtaaactgaggaggtcagataggtctctccacaggtcccttgagatcctctgttctttagagagctgtgaatgaatctaaggtagcattagtatgaaaactgatttcaatttgcttatgtaatgtttatctaatttcgtgtttaatcatttttgctataggtattcttagttataagataaactttattttgaactagagtgggaaggtgtgtagacttcattgtgttgatttaataaactgtgatcatagtttatgaagatgcagagtgtgagagttttaaaaaatagtgtaacttggaaacccaaaccttatttgaatattatttcaaaattccgctgctgatccagtggggtggcctagtcgataggtttaaatattattcaagtgatgctgccgcatgtactgtgaatacaaggtacttcagttgtattttcctcaagaaactccttagatattgatcagtggaataaagttattgagcagctgggaacaccatcagcagagttcatgaagaaacttcagccaactgtgaggaattatgtcgaaaacagaccaaagtatcctggaatcaaatttgaagaactctttccagattggatattcccatcagaatctgagcgagacaaaataaaaagtaagatatcctttttttcttatacttgtgttttgtaattcaggtggtgctttcactctttcatgtttgtattctaaaaacctgtgttttgggagagaaagtcattttaggcctgaagtctgaggtacgaaggcactgaggagagaaagcttaaaggtctagaagctttatcctctataagacggcttaattgaagcctttggccaaaataaaaataatcaaatcagtctgaaagaatcttatgttacagttacagcaactggaattcaaaaagttttcaggtaagaagaacacttaatgcagattctagagtcagaagcgatgtgacagttgttcgatgaaaaaggtccttcctccccaccttctcctgcaccctttactacagtgtgattgtttaaggaaaaagaaaagatttgattctgtccgcatgaaggtaaactgtgccttaatcagaaaagccccagtctttgcttattcaggttgtgaactttaattgacaaaacctaggtgagccttatatttaactaagttattgaacttgtttttctttttcctaaataccaatctgtagattaaaaaaaaaagtgtaagttgccagcactgtatacagctaggccagccagaagcatctgtgagtgttttatcctgtgggaatgtgagattgttgtgtggtttgaaaagtctgttctaatttcatttcgatgtgacttagagaaaaatactcccccgtgcctcatgcccacactctgggcagtgccacccgcagctcggcaattgccaccttccttgctgtggtttcccagccttgggccctgcccagacattggtctgaggctgcctggtgctcttccccaccaccctgggagcccaggtttctcttccccttgcagatccagaggcgtaaaactacatttggaaacctggtttgtcatgaaagtggacatttgactttttcttaaaaatgtttgggttatggctgggtgcggcggctcacgcctgtaatcccagcactttgggaggctgaggcaggcggatcacgaggtcaagagatcgagaccatcctgcctaacacagtgaaaccctgtctctactaaaaaaatacaaaaaattatccgggcatggtggcagacgcctgtagtcccagctgcttgggaggctgaggtaggagaatggcgtgaacccgggaggtggaacttgcagtgagccaagattgcgccactgcattgggcgacagagcgagactccgtctccgaaaaaaaaaaaaaaaattttgggttatattcatcttgaacctatcaaacatttctcaaaattaatatatctttgttctatctgtgttgtcatatttagttctttattgtatgattctgtttgtttcatattaacagcattaatttaatatttgttgtcaccctagcaagtcaagccagagatctgttatcaaaaatgttagtgattgatcctgacaagcggatctctgtagacgaagctctgcgtcacccatacatcactgtttggtatgaccccgccgaagcagaagccgtgagtatctgttttgaaaagatttatatagagaggccaggcttatatttccttggatcttgtctgtccgtccagagtggctacatatgggtagcaagttctccatttgggggctcccagttacagaaaggccaagtgttgtctgagacctgggtcgcttgctcttttgctgctggagccccagctcagagtacctcgggaatgaacttccgctttggtgctaccagtctccattttgcaaatgctgctgtgagctcatagtttattaagcatctattctgtgccattggctttggttacatcctcttgtttaggccacttaaccagagaggctgagcaacttgctgaaaaatcacacgtctgtttatccttccctaaaggcattgtagctcctggttcccccgctggaggagctccactctgagtttggtgctcacgtgcgtgtttctgtgtcagcactggtgtgagtgagctttagctgtgagggaaatcactgcgtagtggcaggcttccttcatgccatgagtgaaatacatgtttatgtcatggcctgtggttttgccatcagtttaaacattgttttatataaaaagaatccaatttataagcagacttttataacagtccatttatgagttggacattggatttgggagttctcccatgaagaaaatgtaaaatttgttctaagaaacaacagtaccttccatagctgccagcacagtgccttgtccataatgggtctctgggaaacagcctgtgatgatgagtttctaatgacatctgggcagatgtctgcgttttgaggtcaggtgattattaagaggaacataataactcttctttggttaactttttcataattattttgattctaaagttgatataatatcacatgacaaatctttattaaaccacgtgttgaattaaactaaatccatatcataaatagactagaagtcttccaagcaattttaccttttttagtgcctcatttttttttgaggcattactgttgactttacatatgatttaatttttagccaccacctcaaatttatgatgcccagttggaagaaagagaacatgcaattgaagaatggaaaggtaaagatggagcttattttgatccttccttttgacatttcttccaatcctgtagagcagaggcttttcattttgtgacatttcccttcaggaaggggcaagaaaccctgcgacccacttagcctctttctccccagtttccagtagaaaatgaacttgaagagaacagagttagagaggaacatttatgaatttcttatcatttgcttcaagagggaaaaataatatttttttcatggcttttcacatattgatttataaactgagcttagtaattgtatcatacttatattgattgatatgtttttaagccatgtagttgtacatatgttttaaaatctagtttgggggaaattgcagattgaaaatatgcaaataggtattattaccactataagattaaccaaacaacccacaacaaactatacctgtaatgaagaggttgaactaacaatttttcattaagaagcaggatcagtagtaactgagaaccacagtcagagtcagtcaacactgatgagggtcatgccccagggccatcctggggtgtgggagtgccggttacctgtgtgtgcccgtgctcagcagtgcatgcacacagcgtgctcactggcctcagtcaatgctcactggcctcagcgaatgcttgcaacgtgctaatgttggtttatgaatactgacattttaggaatccctcatcacttacttcgtaggtaattagtttttcttacagatgaaagttgaggaaaaccgaagttgaaattaagaaaagacttaggcctgtggattcatttctggccagtgtggggggctcctagcccacatgtgggtgctggttacctttggagaaccccaagtaaccacatagagaaacatattcaaatgggtgtgagaatatccaatcccctacagtgttctgtgggagccactccacttcataaagcccccttatggatccagaaccaccctacatgttttgctgccttactagttgcattgaaaaagatgtaatgtagtccaggcgcagtggctcacacctgtaatcccaggactttgggaggccaagtggggcagatggcttgaggccaggaattcaagacaagcctagccaacatagcgaaaccctgtctctacaaaaactacaaaagttagccaggcatggtggtgaacacctgtaatcccagcaatttggatggctgaggcatgagaatcacttgaatccaggaggtggaggtttcagtgagtcaagaccatgccactgtactccagcctggatgacagcatgagactgtctcaaaaaaaaaaaaaaaaaaaagaagaagaagaaaagaaaagatataatgtatcaaaatatgaatattttggtccaggtagactatattactgaattgactctgtcttacaattaaaaataacaaatcgcaatgcctttgttccagttgatttggaagcagagtttagagatacagtgaaactgtttagaaactgattaagcattttaacttgtatttttattaaagagctaatttacaaagaagtcatggattgggaagaaagaagcaagaatggtgttgtaaaagatcagccttcaggttagtgattgctttaattgattgtatgatatttttctttccctattcaactttttttttttgagacagagtttcgttctgtcgcccaggctggagagcagcggcgcgatctctgctcactgcaacctccgcctcctgggttcaagcaattctcctgcctcagcctcccgagtagctgggactacaggcacgcgccaccatgccctgctaatttttgtatttttagtagagacggggtttcaccatattggccaagctggtctcgatctcctgaccttgtgatctgcccgcctcagcctcccaaagtggtgggattacaggcacgcaccaccatgcctggctaatttttgtatttttagtagagacggggtttcagcatattggccaagctggtctcgatctcctgacctcgtgatccacccgcctcagcctcccaaagtggtggggttacaggcgtgagccaccgcacctggcgtctttcccgattcaacttttataaatggcagcaacatgtgaaatgccagcctggctagcatcagatttaaaaaccgctgtatgaatagccagcctttttggcttgtcatagtggtggtggtggtggatgacattttactgatgtgccaggcactgaactttgttataagcatttctctttcatctttgcaataactgctgtcacctccatttacagatgaagaaattgaatttaaagccttttcaatgttgataaccctttgtactggtcccacccaaaatgccaatctaagtaaaatggagtatggtattctttttgagaaaattgttgatatcattttcccatttttctgcttgatctactgatcttcatagtggtggaagcctctaatgaccaggtagttgtatgatcatgagactctgatatgagtcgtgttcacttacgtctgaaggattcttcctgtttactaaatgaaacgctcacgttatatcattgtctctctcccactcccactgggaagcatgcacacacatgtgtgcggatgtgcagagagcacagcttactttttattcttgaattttatgttcaacatgacgtatgtgtcaagcatctagagattatataacttcagcaagaacttaggtgcttgttaactgagcacacacgtatgactgcagacgtcgatctcagagagtgcatgttgtgtttttattcaaaccagactaaaatatggatagtaggaagtaggatagtttcatttgctttaaaagattaaaatgtcagttttctggagttataaaaccataaaatatacaaggccactaatttttttcctttttctggtatatagtctttatttattgcaaaagatttctttgaaagttgatgctttttttcctgtagatttagtgtttatgttataaattgttacaattcaagtgtctggtgacactggaatcctagtcaggcttaagcttttgtgatactgcattttcagataaatatagctgtgtccttttgatgtctgcttgaaagcagcaggtattttttaagtagctaacatgattatacatggccacatatatgtttagctactgagaaaaaaagaagaatcttgcaaggaaagacataggaatatgggactcttggcccaaagaaagactcaaggaaaagttcagaaagtccagctgactgacttcttgtctatactcatagttaggattgggaaactgcaaaaggacagagccgagaaatggcctgcagtctcgctgcctggatttgcagcaatgtcgtgcctcagattttattatatttggttttcttagcacagatgcagcagtaagtagcaacgccactccttctcagtcttcatcgatcaatgacatttcatccatgtccactgagcagacgctggcctcagacacagacagcagtcttgatgcctcgacgggaccccttgaaggctgtcgatgataggttagaaatagcaaacctgtcagcattgaaggaactctcacctccgtgggcctgaaatgcttgggagttgatggaaccaaatagaaaaactccatgttctgcatgtaagaaacacaatgccttgccctactcagacctgataggattgcctgcttagatgataaaatgaggcagaatatgtctgaagaaaaaaattgcaagccacacttctagagattttgttcaagatcatttcaggtgagcagttagagtaggtgaatttgtttcaaattgtactagtgacagtttctcatcatctgtaactgttgagatgtatgtgcatgtgaccacaaatgcttgcttggacttgcccatctagcactttggaaatcagtatttaaatgccaaataatcttccaggtagtgctgcttctgaagttatctcttaatcctcttaagtaatttggtgtctgtccagaaaaagtcgatttatgtgtattaattggccatcatgatgttatcatatcttattcccttttatgctatgatttattctatcttttgtatttcagaagacatataattaaatctatttaataaataaaaatatatagcttttcttagatttgtgatgtttggggctgagaattatcacggctaaaaccaagacacttatgtggacatcttgttttctttaaactgtcttgtctgggatgattgtacattcagctttactgcacgatacaattttaagttttgcttagtgctgcttgaaatcctagctaccttatctcttttcttcttggtcttctagacttcttatgaatttaaaatgctacctagaacttcaccttctttattaggtgcgtaacactccatcttaattaaatatgatggcagataggttcctgcatccatggcctaacgttggagtggaattttacaaaatgctcactagagatcactgcagtcatttcctaagtgcttcctttgccacagactggcctgggtcctttatttaccttccctcattcactttccctcggccaataccacgttcttgattttctttcttcactggaagaaagcagataaactcctctttggtctgttttcagaggccaggctgattcagatgcctgttgctattgttgctctccattgttgggaggcattccttttcacaagaatgttctgggaaactcttcagaggacgtgaaggaaataccctgaagagtcatgattaactattgactattttctgatttaaaactgctcacctgaaattgatacttttagactttacgatcagtaaattattcagaattcatgaagatgctgagtatgttaagtgtcactgcaggaacggagctgtggtgatcacgttttgcctgcctgtgcccatgtctcttcccttgagcttattctgttgctgattcatatcttgtgttcaattattttggaagcttttcagtcgacattctgtagagtgtgttctgaggaggaactgtgataagaaagtttattataaatattatgtaaaatatatggctctctctgcaccagttatatcttattggttggtcatatcactggaaactggaacctttgattagcaaaattaatattgaaataagaaatagttcttttatattgtgtcatttggacactttcaagtacaaaatggtaataataacttggattgaggcggaaacacctattttatggctatctatctaaacatcttaaaatggccttctctgtaatacactttcttttaaaagacttcactaaatctatctttaaaaggaaaaacaaaagggagaggttgaaaatgcgcgagctgccctgcactgtgtgatgctccctccccgggagacgtggacgggggacgaggcacccgcagacgcccttctgctcactcgctcctctgtgcattcagcgagccacttgccacagatggagcccgtgacggtgtggagggtttcctggaaaggccatcttccaccaggtagaggcgagcgtgcctaggacaggccacagggctccacagaaatacctcaccccagcttcagggttctctctcctgagcctagatttgccagggtcttggtgccacgcaaatggtttcaaactgatctctatggataaatgctgatgttggttaaagaactgaaaaatgtgctcaactgtttcatcttttctattttatttttgtaatttatattgtacacaacccaggaagtaactattttggacatgtatttttataaaccaggtaatttactattatcctggaatttagactaggtttgtttcatttgttgacttagtttccagccaagaaggaaacgactgtctcccccatgtccaggtctcagtttcaagggcagagtccagagagcagacagagttctgtgagagcaggagagcagtctggaaaccctggctgtgcataccgtgtcagccgtgggcctggagatgggagcaggtgagacgcagagccccagtactgagaggaggaagccctcttacagggccccttgcccaccccaagtccgtgtctgaaacacggagcgggtgctgcttcaacccgcatttaatgctgtgtaagtagcgataaccacgtacgagtctgtctggttgatttctaatgtgactcctctggtatttcctcctggtaataaatacaagtgtgacctttcagattgcatatctcaaaagtaacattgctaatgttttataataaaatatattatgtgtgttttggttggtgaaaataatacagactacattttaaaagataaatgtatagcatgtccaatttttgtgtgtttttacatggcaattagatatttctccatcaccatctctgatgacagatttaacatgaacacagatagatgataaagtgtcatgcttttgatcaatattagcaagaggtttcacactgagaggcagaaacattgctgtttgttctcttattgaaaatattctgcaaattcctaaatctgtgttttcaaaactaatggcagtaagttttgacttcaccaatatgcaggtccaattcagagtattggtgtaattgttttctcatgaggcgtggccaggagaattcaccagtcagccttagtcatgttacttaacgtcattcatggtgcttgtggctttgtgcctgggatgagccaagttcatctgacgtctgtgtttgaagcacttcaggctgtttagtacttaataccacaggagtggaaggaca

SEQ ID NO: 45 - DNA, 349649 bp, synthetic construct
  source 1..349649: mol_type = other DNA
acaatggtacaggcagcatcacgctgcacaatggtttccaggcagtgaaagagggtgattcagcaagccactcttcttctattttctttaacctccccttcactttttatttttatgggggtgggtggtgcttgctatatgcttacctttttcttttcttttttcatttttacaaatttccttttttgtcctcacccctcaattcctaggggcttgagtgagtttaagattgggttttcttggaaatcacctgtccatcgttaattttaaacaatctccatatctccaaagaatctcttccatgttagtctggaatgtggttaatgaaaaacaagtagggaggatttctggggcaaacactgccggatcaggatcgtagttctcaggcacggaatggtaggtggctctttgctcgttctgggttctaacctgtttttggagggtggggtgatgtctattgattgctcctggtggggcgggagagggagtatggaagagacgagagaggtggggtggaaagcaggttaatcaagtgaactagctttgaagcaagaagctaccagtttttccctctgtgcagaacatctctttccagacttgggcgtgttgaaacctttccatttggagtgaggggtagcagagggagggagggagcattcttattgtgaccaggggtttttagaccaatgcagggctacagaagggaagggagagagagagaaacacacacacacacacacacacacacacacacacacacacacagagagagagagagagagagagagaggaaaaaaaaaacaccaaacagctgtgcttgttagaagtgctgaccttagttccatatctgaaaaatgtgatgggttccataaaacattaaaaataatgtcttttagtatgtatttatgtttacttttgtgagaagtataatttaaatattttaagatgtattttactaaggaacagtatttatatatatattagatataaaactattggcgttactcttgcagagcaactctaggctaaatctgagccggggagaggaacacagaacaggggtcaggttagagataagaggaaacattggcactgcagtcaaataggtaaggggtccctttaagaaagtgatctcctagtcacagcagtcagctttctttttttcatggcaagattcccaggtattctgtgctgggatactgtgtcccctgcaaatgtcagagctcttttgaaaaaaaaatcagaaataagtatggcagtatatttgttagaatctatgtatttgtgccttcaacaaaataaatgtaatttactggaaaatctgtaagtaaatcaggctatagatattacaagaaaactatctatccatatatttttctcaccctccccaaacatttaaatctagagacctagtctctgcttttacccccttaaacagataacttcccagggtactgcaatttagccacagaaaaagaatggcttatgccacagcagtaggctctgaagcaatcacaaggttgtttacatgggctgcctttggtgcagagcctgacagtgtctgtacagcagccctgcctgcttctggccatgttgatgataacttttatgaacaaactgcaaggaagcaggctaagtcatatgggatagactacagttcaggtggaaggaaaacgagtgtaagtgcaccaggcattgccagcacaacatccaatatctccttctatccctcatcggctagttgtcggaccctggaagataacacagaatgcttatcaacatatttaaaatagttgcagtaaggaccatttctctcagagaagcttctgtgaattttctactttaggtgagcatatatgttacaaatatataacaaataaatatataagtatatcacaagcttctgactccacttcagaaccattagattttaggggctggatgctttggatgtagcggtttggctgcctctggtatgtatttccttctctaccttgatcacactcttaaaattgacataaagtattggattagcttattttcttatgtggagcaaactgggttttctctcccctacaatgggactagaaaatcagatgacaaaggtggtgtgaccttaaatattagagagtcttcatgcttcctcatttgcctgtcattcctctgctgttgcaaagtgtctttaatttgaggggctcctgttcttaaaaaatcctcacagtttcagtaaaacgattctggatagtgaggcagtaagaaattatatgtagagtgggaaaatcagctgcctccagcttcctgcctgctagccccagaacagcatctgctgttgagaggagtgtgtttgccatgctggaaggggatgtttatgaacagatcccagaggggctgagtgtgtttttgctgtcattgtctggtatgtctgcagctattagtatttaatggtttcatagtacatggtctatatattctaaggttagaatgaactgataatttattgtcaatgctataaaatgtagatattttaaatttataggaaaattaataagattttccttgttaggatatcctacaggaacatcataagcaaaacaaatttgcccaacctaagtaatctagaaaaacctcccatgtttaaaggcataaatatatttttaaggttttattgtggtttcatgtaaatgaatctgtttctttggatgtaagcctagttataaattctttttatactgatactaaaagctaaagacaaattgggtatttacttgtttgttaaatatggggatagatgttctcccttcatgctctagttctggcctcaggtcacatttgtagccaaaggactttcagtggaattggtgtgttcaaatcgaatgattgcttggttgcttatcagaataaaggactcaaagcaagagagacttccttcaattagaatgagaagcaaacacattgttgtcttaaattctttcttcattgccctttctatttcctcttacagtctcttttaagcttttggttggacattgcaacaatcatgcagaaagaggcacggaagtgtccagtagtgacaagaatggagtacaatgctctatttgctgcaggactgctgagtgccttcctcctaccacacatgcatctattattgcaccttcttctgaggaccaaggacttgtggaaaaagttgggcctatagactagtaggggagatgcttactggtaaagaagaacagaatccatttgcttctttggcatattggatatatttattgcattacataagcctgagatgagacactgtactgctgattcagataaaaagatcatgctgcatattgattgtttaaaaaatgtaacttagaattggagcccatcttttcagaaacctgtacgtgtttgcagagtgaagttgtaaggttttgactcaagatttttcagtttgagtacattttatcctcatgaaccgatcaaggcaaagaaggggaaaatacaaaacctgtgttttgcatatcttttgttttctgtatttaatagggagaagctgtatttcttattgtgaatcttggtagaaactcttaagaggagacatcaggtaatattgaaaatcactaaatataaacattttaggtttaaaaagtagacctcacacatatactatttctggtaaaggattttctagtttatttgatgttttggatccatatcaagccactatggcttttcttacagttcttatctctggtgactatgagatgtaaaatccttgaggcttatggaaataatgctagtaggaatggaaattgaagttttcaatggaaaaagaaatgaatacagtctcctgagaagcatccctaaccacagctgctctaaaaccctgcatggtgtgcaggtttaaggcaaagcttccctataaggcaattgggcatttgcagtgacctgcacagtaataaacaggattttcactaccttgtgtttgtacacgtgtgtgtgtgtgtgtgtgtgtgtgtgtgaagaaaaacaaaaacaaaaacagcagtgactttaaagttctagaaattcatcttagtgacttgtcttcatagaaataaaactgactcctgtttgtctgtgttaacctgcctgggtgccctatgtgctttctgaaaatggattgcttaaagcaattgtcctcttcttatacattggaaataggatctgaaagcattgatagtgaaggaaagctcttaggttaggtctgtttatttggcaatgtttattcagtgtttgtaggcggaagctccagcacagcatttatataatatagtaattgcctattcttctattacctgtattctctactaaggtttaatccccatcagggactgactttttctgtttggcacacaatagggacacaccaaatattcattgaatgaatatctctcatgtactgagttctctgctaagtgctatggtagaaaaaattgggaaactgtaacacagtttctgccatttggaacctatactcatttgggaagatgaggctaaataacaataaagatggtataaaatcaagggcccatattagtgttttgataatgagtgcaatagaaattcagaggagaaaggaatttacctcctctgaagtgatggtaggtgacaatggggctacactggggtgttggggtgaggtggtgggatagtgagagggtggtagtcctaggagtaattgtgagcacctgggcaggaaagaaactcttacttggggtaaagaggaggcctattttgggtatgatgaccatattttccaaactagaaataaaaacttatggtttgacattgggtagaatgttgcagactgccacatattctgaagaatcttgtctaatataatgttgggaagtaacaggctataatggtgaaaaagtaggttagtaactagaagaacataaatacaggtctcttcagatgagctccagcttaggtttactttcttttgcatacttcagaggttttcaaaattctcctcctttattggtacctatgtaaccattgttccaatgaaatcttgtatgaaaagcagaatatgtaaatctatgtaatagtggagctgtcccagttgaggatgagtggggtgccttgtattagaaaaccaaattcatatcacaagactaattatattaactgaaataagaattactaatttagtttatgctcagatattaaaatagttgttctggtattataacatcaaagttcttgtgcttgcaataaatgatgaatagagataattaccttgagatattttctttcctctgcctacactcacccacccagtaaccaactgtctttgatgtcagctttttggttttctaaatacaaatttaaatcttaaaatcaaactcatctgttttttggctttgctttcaggctagtgtgagaaacaccaacagcaggcccatctcagatcttcactatggcaacttatgcaagaaactgttgaattagacccgtttcctatagatgagaaaccatacaagctgtggtgagttgccaatttaaaaatattccttagcatgaaaactaggatctatatagccaatttaaatattgcatatggttttgtacatggagctggagaaatactgctccaaataatttcgactacagaagtgaaaatcaatagaacagaagtttaatagttggtgtggtactactaataccacatacagtagtgaaaagtcttgaggtgcatgggtgcagcatataacaccatgatactaccaccatggatgatacctgcaattaacattttcatgtggcagagtaacagttgggtaccattatttttaagtgacttttattatttgcaacattgtactatattttacagattcatctcctttagtagaaaaattggttctgagctaaattatggttttctttcaggaacacacacacacacacacacaatttagctcttctgaaataagagaagagaaatcacagttttataaaactcaattcatgggcattttagcctacaaatccttttgcttaacaaagcaatgttaaaaatagatacagttgctctgcctagttggaatgactttaaaacttattactttataaaaatatcagcacacacaggtagaatgtctttttaaatcaaatacttgatgcttcatagtcaccaaagtcaataatcaatagattccagcagagatgaacgagttataatctgtcaaataacatctttgagaactagagtatgactgtggtgcttataagactccaaaagaagctattttgagctagtgatcaatatctttctttcatttgcctagtggcttatataactgtagataggtaggctgccctgtgaattaatgcacagcctatgactgcggaagactgatgaaattaatcctagagttatttcatatagtgaatttataaaacaattcataaaaaacaatccatctaccattatattgagaaagcagatctaatagcatcactatactgtgcttaattaacatgtattcaatgagcgttataaataattttatgcaattgccaataacaaactatttttgacctaaaataagggcaattttatatggttgaaactaatatattatgtgttactcccagtgatgtagaaagcataccatgttctctccattctgaatattaattcattaatcaaactcttattgagaatctgtgatgtaggtagaatgtttagcttttggggcagataaaagacagtccttgctttaaaggagccctcagtctaaagagtggggtacttacaataaaatgtgcttattaatggaggtagttgtgttctaaagagtgtggcacttacaaagtgctattacatgggtaggtctagagtgccaaaggaagtgcatcagaggagactctaccacggatgtggtagagattagtcaaggaagacttcccagaggaagggatcttttggtggactattaagcacagtgaaaggatagccagaggaagggaggatgcagtgcacagtgggaacattttttaacagacccagaagcctgagagagcatgattgtgtgggaatactaggtatcatttactatgctgaagcagaaatggtagtggcagagataaagttgaagagggatacaagacatgtgccatgaaggatctcttagacaaaattaaggagtttggattttgtttcaaagtgaagagcttttgaaagattttaaataggagattgacataatcagtttattttttaattgtgaaatataccatacgcatagaagagtgtataaaacaaatactggttaaagaataattataaatcaaacatcatgtaaacaaatcaaacaacataaaacaaatcaagtaaatcaaacatgatgtaatagactcccagcaaacccctatgtgtccctttcagatcacatacttttccttccccaccataggtaaccgctagctactatcccaccttttgtcatgcacattaccttgcttttctttgtaggttttccatctatctgtgcatctctaggctatgaatcttagttctgcctatgcttcagctccatgtatttggagttacagcatgtatactctcaatcacctgattattctgctaacattgtgagattctttcatgttcatgcatgtagtttattcatgtaaattgttgtatagtattctattgtatcaatatgccaatatttacttatctagtctattgttgttgaacatttggattaaatctattttacttaatgctagtataaatataaatataatatcatttttatgtttatatatattagttctcatagtttctgatatttaccgttttctaggataaatagcaagggaaggaactgctgagttttggggtatgtgcgcctttaattttactaaataattccaaaatattttccccaatcagttgcatcaatttacattcccagcagcagtatatgagaaactctgcattctcaccaacacttgatttacaagttcttaaattttgctaatcaggtagatacataattgtactcataaaagtattaatttgcattttgctgattactaatgaagaagagcatctttccattttttgttttttggtaatttgattttcgtcttttgtgaagtacctgctcaaatctttttgagatgtgtctttcaaaatgataactaacacttattgagttctcactgtgtaataggcactatagtaagtactttacaaatagttcatcttcctagtatccctgtaatttagaggtaaggaaaccaaggtttagagaggttaaatcagttgctgacaatcacatagttaaggaacagtggacttagcattcaagcccaagtctttctgactccagaattcttcagtttctcggtgtttggaaggggatttggttggaaccagggagaacatctaaggtgctattgcaggaatccagttaaaaaaataagtgcataaaccaaagaattgctagtagggcatatgtaacaaacaactggacttggtaatgaatgtggtgggcaaacaagaggaaggatttttaaagtctcaagttttaatacctgtcggctaggtagattcaatatttgtcataaaatgtgtgtgtgtgtgtgtgtgtgtgtgtgtgtgtttgtgtatacacactgtatatatatatacacacacacattgtatgactaatgttgtaatatattgtcatcctttgtacatatattgtacaatacattgtcatatatatattgcgtgtgtgtgtgtgtatatatatatatataaaatacagatattgtggtaggtactaataattcattttataaagtccaggtattgtaggtactaagagtacattttgtgaatctacaattcaatgagatgaatttagttcacaggctcataaattttagggtttaaagcaatgacactgttcatttgggtcaaatcttcacttttttttaaagatatggaagcaactgctaaggagggtaagtggcttgtccaagatcacatgtttctaagtgtcaggttaagaatagatacgatgcctgcaaaaaaatgcaaagaaataacaaccacctgatttttaaattaacgagtgatgacacaatcaacctattctatttcctaaccatttctcagacaagtcctttttcatctaaatctgttgttactgccataatttaggtcctcatcatcatctttggcaggtttatttaagtagcctagcatactatcttcttgtccattattctaccagtgaagccaccagacttgttatttgatttgcagttgttaccgtataattgccctacttaaagaattttcaatatactctgtcatccatgtaataacttcccttttccttaagacatgccatacttctggccaggtgggtggctcaagcctttgtaatcccagcactttgggaggtcaaggctggtggatcagctgaggtcaggagtttgagaccagcctggccaacatggtgaaaccctgtctctactaaaaatacaaaaattggccagacgtggtggctcacgcctgtaatcccagcactttgggaggccgaggtgggcggatcacgaggtcaggagatcaagaccatcctggctaacacggtgaaaccccatctctactaaaaatagaaaaaattagctgggcatggtggcgggttcctgtagtcccagctacttgagaggctgaggcaggagaatcacttgaacctgggaggcagaggttgcagtgagccgcgatcgtgccactgcactccagcctgggcgacagagtgagactccgtctcaaaaaaaaaaaaaattatctggacatggtggtgggcacctgtaatcctagctactcaggaggctgaggcaggagaatcgcttgaacctgggaggcagaggttgcattgaatcgagattgcaccactgtactccaacctgggcgacagagcaagactgtctcgcacacacacaaaacaaaaaatgatatgtcatactcccatccatccccattttagatactcttgaccttttaaattgcctggaaacaccagtgtgcttcagtctcatcacatctactcaggtgtttcctacctctgtgatttacttcatgctgtttatactgcctgtattcactctgcacagcccttacttactcctttccatcctttaagacgtttgtgactctatgatggtctgggggctagcagcatggacatctcctggagcctgatagaaatgcagcatctgaggtcctactactcagacagacacactgattaagaatctgcattttcacaagattcctaggggatttaaatacatgttaaagtttgagagtactgtttagaatcactttagatttcataagattctatctcctcctggaaacctctcagatccctttcatccagcattcaatcattcttggtgttctcacagtaacctgtgcattatctacctcactgtattaccatagtatcttattatctgtttattatctgtttgtgtctgctttgcctcccaccttagccagggggtattttgagcaagactcatctttgaatttcttatacctcatacagcgcctgacacttgataggcactgcataaatatttattgaatgattgacaaaagaaagaagaatgagaaagagattgatatacagaaagaagcagaagcaggacaaagacagacacatgaagaaaaaaacacatagctaaagagacttccatagagacaaaagcagtttacacaaaggcatcacaaattctgtctctggatacaatgtggaaggcagcctggcagagagtccataatcttatttaaataggttaggtaatagcctatgttgtttgccaatctctcagaagaaaaatttaacttaattgctcatttaacagcattgttttttgatgattgttattaagtaaatttttccaaaatttgccttactttcctaaacaaactgttgttctgtcatttttactattcagaacctgttgggaatattatgtgtagcttttagtgccctctattaggaatgactttcataaaatgaaatgagtcctgaagattttgttgaggatggtgaagatatagaaaacatatcttgtggtggacagtcaagaaaaattatagtgttttgcccggagaagagaaatgaagaggaaagatcgaggtggagggtggcagcgctagagagtgaaagagagtgcaacttaccaagcaactgccttcaatatttaacggctttcatatgaaagaggctagaggatgcaggattgtttgtaagttgtactgaaggcagaactaagagaccaaagagtagatagtaggtactgcacataaattttttttttattataagaactgtttgagcctgtgctttttgaaaagtagtaaagttttcatcactgaaagtatttaaccatcttcatggttgaccaagtatgaagagctttttagagatgatactactttgtgtgggagattgaactaaatgactgtaggatctaaggtccctattacttatgaatctatagttattcagagaagtacaggaagaatgggggttataataaagaactacaatagtggctaacatttatagagtgcctacttcatgccaagcactgttcatagtgctttgcatgtcctagttcacttgagcctgacagcaatactactgaacattcctattttataaaaggtgaagacaaggcacagatgatttagtaatgtgccaccggtcatgcagctagtggtgcatgattctgactctggagcatatgcttattactgtgctgtcttctttgtagtgttaaagatgaatattggacctaaatagagccttaaaatattgatatggtttgaattccaggtaagtatatggataagaattccaaggaatagtaacagtaacaatcaaagtgaagagaaatagaaattagcataacagatttgtggaatcaaataccttacaaatgagatgaataagagaatattcagaaatgtttaattctgtggtgctgttctgtcttgcttctcaatggctgcagcagttaccaagatgggaaattaaatctttaggagtatttaacctggtaaaaccgatataagtagccccagactatgttctgaattttgtgttccctccaaattcttatgttgaagtcctaaccccaaggagatggtattaggagatggggcctttgagaggtgattaggtcatgaaaacagaggtgattgggattagtgtccttatgaaagagaccccagagagctagctagtattttccaccatgtaaggatacagcaagaatgcactgtctatgacccagaaagcgaaacctcaacagacaccggatctatttgtatcttggacttaccagcctccagaactgagaaataaatttctgttgtttataagctgccaagtttatggcattttgttatagcagcctgaatggactaagacactctagtattgtataaaatttttacaaacttttttcctccactgattggtagaacatgtagctatgtgtcttaggaagatggggctgtcactgtttgagagttcccaagtaatttgatgccagatcaggagcacaaattcaatgctttctcttagaaattgggattttcctggagtttatttgaagactgagtaagcatctgcaaaaattttaggttcttcataaagaattctctgtgttttgataaccagtatcagaggaactagtattaaaatcaaagtatgagattttaatgaaaaattggttaacataacaaagctattcaggttaagacttgaaaaatttagtgtatagtttaacagcattcattttatgtgataatttattatttgcattgtagataccataaatttaaagttttctttctatttgtacttttggagggcccaggtggtttgttagtgctttaaatcctgagactgacttttaagctctttcaaatttgactggacaatcttgatagtactgctttcagaaagtcacttataaatcttaagaatgaatgcaattctactttggagtttagtctattaagatatatataaatcttaataaagatactcttttatattaagacatatgtgtgtgtgcacacacatgagtacatatataatattgtactcattccctgccaaaaagattgaataaaatatatttagcaaaaactacgtgaaaaagtgggtaggaaacaatttaagctatacagctgtgtttaaactgtgtgggtccacttagatgtgtttttttttttttttttttccaaacaaacttgggttaaaaatacagtattcctgggatgtgaaacctccagatacggagggctgacttttcctataaggctgattgttggacttgagtatgtgtggatttggttagagacctgaggtcccggatataccaaggaatgaccatatttcatcttttgtgagtttcagactaatatagttagccctttgtgtctgcagtttcacatccgcagatttaaccaaccatggtttgaaaatgtagttaggcctatgatggttatgtctgtactgaacacacacagacatttttctcttgttataaacaatacagtataataactatttacatagcatttaccttgtattaggtaccataggtaatgcagagttgacaaagtatatgggaggatgtgtgtaaattatatgcagatactaccattttatataacgggtttgaacatccttggattttggtatcctccggggttgtcctggaatcaatccagtgaagatagcttgtgacacctttatatcatgtcatatgtttgtttgactatcctactatcctgttgccaaccagggttcaggttaacaaagtgaagcatcacaggcaataagctctcattcattgcacttattgtagttttggtcctttgtatagatgtctgactctgtgttataatttaaggaaccaaaacacattctgttttcatctatctctgcttctgaatctgatatcatgtataaaatttccacttgttcttttagttgaagacttcaaccattgctattcaaacagaaatgttatgaggcaaattgattggcttgctaacctgataaactaacttgaattaaggtgtgaattggtcgtaatggattttggatcataggtactaaaaccacatttgaataaatatggtgcattaaaatagcaggacactgcaggaatatataggaaaagtttttatatggagagggaatcaagaattgtctagagcggggtgttttgttcaagatttttatatggagagggaatcaagaatggtctagagcagagtgtttgttcgagtttagaagatttattcatatagtttctggaaaaggaagagcccttgaagctagatttttatcccagctatgtcatgaattaatattcccttgggcaagtcttaatttctaaagtgactaagacaccaatagtttcaccgagtatattggaaaatctcagtacagtttagaaatcctgatttctaaaggtgaattttaaaagatttctctcataagtaatcaatgaacaaatatttgtgcacaccagttcttcaacagcaaagaataatttcaagataagacaaagctgagcttcaactgtatatgagagaattgtaatagatggtgtctaaatttctttaattgtaaaaattatgtggattaagttgcacacagattgaattaaagaatgagatgatacctaagcggtctcatccaagtggggtaccttggtgagggaagccttggctagtgaaggactccatgaggatgcaaagcagctacgaggggaagagggggctcagaaggctattagagagggacttgctaatgcacaattttgctttaactttccccgttttgttgtcttcagcttaattctgcccattcttatttactctgaatcaataaataagatattttagctataggaagtcacttctaattattaaagatgtgctaaacataaggaagatagtttatgcatagccagccaaactgactatatcaattttccaggtttgcatcattctttatcccaaaattatcctttgctattgaaagactagtgtgcacaagtatttgtttattaatttacttataagagaaatcttttaaaatttgcctttagaaataatgatttctaaactctactgggattttctaacatatcaggtgaaactattggtgccttggtcactttaggtatgatatcaacataaacacatttacatgaagttaacagacattttcaatgggcagattactgtggtagagtcttggaagattaaatatcacacagttccttcctccctcccctcatattccctgcttcccttccttcctccctccctcactccctcacttcttccctccctccctccctcccacgaatatttactgactgtttactctgtaccaggtgctgcagaaacaaagataaatttcactttgtttctaagcagctcactattaaagtagggggctttggaggtggggagagaaagaagaaaatcttgtgaataaatcccacacagtaggatagtttctttgatagaagttgagagcaggcatagtggctcacacttgtaatcccagctctttgggaggctgaggcaggatcgcttgagcccaggagtttgaggccagcctgggcaatatagcaagacactgactctacgaaaaaattagcagagtgtggtgacatgtgcctatagtcccagctactcgggaagctgaggggatagaattcctggagccctggaggttgaggctgcagtgactgtgataagcactccagcctgggtgacagagcaagaccctgtctctaaactcagcttctacccaggcattctcaaatgaggttctgcagagagacatgagcccactgccctcaggcagtaattctcaaatgttttagtctcatgatccctttatattcttgaaaggtaatgagaaacctaaagaatttttgttgtagccactggtatttaccattttataaattaaaatataaaattgtaaatatttatgtaatttatttaaaaatcaatgattgtaaacccattacatgttaacataaatagttatctttttatgaaaactacttttaagaaataaaaataatttagtgacaaagtggcattgttttacacttttgccaatctggttaatgactgctttaacagaaggcagctgaattctcctatctacctattgtttcaattttttgttatactatacatcaagtcacctttggaagactgccatatacctgtgagagtacgagagtgacaatgttgaaccatgtcttcatattatttggaattagttttgactaatttgggggccacatgaaaaggtcttggggacactcaggggtccgtgaactatactttgagaaccactcctaaaaagtatctgttgtatgtaatgaataaatgtctcttttatgcatctagcatggcactattatgtaacacccttgaaaaaatcgagaaaatagtgttttgctatttagataaggtaccataaatgaggaaggctgccagactataagcctcacaaaagcagggatgtttctcattttcacccattacctgtcacaaaatctgacatagaacctgactctgggaatctcagtgacagaacgttctaacaagagggatgtactttcataagtccctgtagtcctaggtagaatgtggtgagtgttacaaataagactaaacatggaggagctggaggaagcagtcctttacagatggtaggtcaggaggtcttcatgaggaagacagcactggggtggaaatgcgaacatattttgatagtgctggagttggaaaggtaatttctggaagagggaacagaatgatcaaggagcagagtgggtttggagttcagaagtttaggcttgcgtggcttatgcataggggacatggcatcagagacatggctaggaaaatagattggggccagactgagggaggccctgaatgatctgtgaaggaatttggggtctgtttctatagatgatgaagaacctctcctttttttctaaactggtttaagaaaatgattctggcagtaatgttggtttgaagaagagaggtaagagaggcaggatgagcagttaaaaggaaggagagagagggaatccagcttgaacaagaggcagtaaaaatctgagtaggagggtctcattgttaaagaaggccccaatgtctcagataatttggagtaagaagctgtaaatgagagagtttcactcaagggcaggaaaacactgggttctttatgatttcattctaggctcagctacagtcttgctaagcaattatgcacaggtcctttagctttggtttctccatatgtaaaatgtagaaatggattgcttgcctttttgtgtcacaggagtctgtgtaaggattaatgagctctgacaggaagacactttattaatctaagccatcaataataaaaatgagaatgtttgccaggttcttttgctcctatgttgaaggctgctatgtaaatatgaaatactgcctggaactattgtcattgttaataatagtaaagtgattaccacgaaacgcctacacagcaaacttgttctcagtcaattccaaaaaggcaagatgaagccaggcatggaagttcattccattttgtttattctaagtcttccttattgtaaactattttcctgcttagtagagaagtcattttaacagtatttgaatttcattgtatctcattatttttatcactctattctggtcacgtattccatcgctatcagggacatcattattctgacttttccctacgcaaatggagatgggacaacatttgatgtgtctagttacctgcatcagtgttcttgtcaattttggctgttttcttcagtttaacccatggctgtatagtctgttggtcaagtaggtaaactccagagttaaactgcctgggtgtaaatccaagttctattattttacatgagatcctggttaggtcacgtaacctcttacgcttcagtttcctcatctgtaaaatggtactaataatggtgctttcccataaggttattgtgaaggtaatgaaggtaaagctcatagcattaggtgctcagtagctgccggtgttttttttttttttcttttttggtcaatttttattaccattgtcatcatgtcttctcttttcctaatcggggtcctttaccatttcttgttaattaattatttgtcttctagtagttaatttgtgataacataattgatcatgacctttttattacctagagtaacattctaaaatatccacaaaaatcttaaattttattcattgctctttcatatattcctcttgtgcttttcctccagcaagtcaagtacttaattctgatataaatataagggatctaaaaagtttgtcctaaccattgacaagtattatttcctatgacacattgccgtcctcccacacaattgtcctgtaaagaaaattggcttgccattttcctttttggactcatgtatttattcttttctcaagatctatatcagtatgtttctgtttttgctattgatcatgtctcttaagacttctaaaaataccttcccatattgtctcagattcattgagatctgtttggaacatacaccaagcccttggtctagagtgcagaagctacagccaagtttgtgttatgctcagcaaaccaaagctcgtctttctaatttgcacaaagacttcaagagtatattgggctagtgtgtgatcctgtttcacaccttatcaattgttatccattagtattgttaagtcatgactgtaaattcctgcgggttttggctaagtatatcattggcagattctcctttgtgtcatagttacatagaatgaatactcagccaccatctctccctgtgttgtccataacttccttgggtcatgaaccaaatgaaatcaatggtcttgcttcatgtgaaaaattgatccatatttgctaatagagaattatattctattcaaattgtataggacattaaaaatgactattgaaaatgcctgctagtagaggtggaaaatgattgagtagtaaggcaaaacagaatatattagcatttaatcagttcttttatgattctagtattgagtctttctcttagtcacactggcttagaaactgtttagatgaacatagcagaagggagtttcctttttgaaaattgttatcctctatctggtattaggtcacagagatgaaaatttagcacctctgctttgtttactttttagtatggggtacacttaccttaaccatatactagatgtgtgatatggtttggctctgtgtccccacccaaatctcatgatgaattgtaatccccaagtgtcaggggagggacatggtgggagatgattagatcatgggggtggatttcccgcatcctgttcttatgataatgagtgagttcccatgagatctgatggtttaaaagtgtagcacttccctccttgccctctctctcctgcgttgccgtggtaaggtgaacttgcttccccttcaccttctgccatgactggaagtttcctgaggcctcccagccatgcttctgtgcagcctgatgaactgtgagtcaattaaacctcttttcttcataaattatctggtctttggtagttctttatagcagagtgaaaacgaactaatacaatatgtgatcttggccaagttatctaatgctggtccctcagttttctcctttgtatattgaaaacaataaaagcatccatcccataaggtggctgtgataattaattgaggaaagagttgtaaagttattagaactatgcctggcacagagcaaaactttagtatcttttagcaagtatcattacctacttgaaataatatagtagttaagagcttgattctggagtagattggtaggctttagttctaactctatcatttgttgcctaggtaatttgtggattcacatttctgagcctctgtttcatgtaaattggtacagtaagaatatctaccttccagggtttatatgagaaataaatgggaagcacttagcataattgctcattgaatattagctatcattttttataatccttatgacacatgacttatataataattataatagcaaatacttatggagaacttattttgggtcagcaatatcttaagtatgttatatacactatctcatttattcctcacaatatctccaaagagataggtgccattgttatccctactttacagatgagtaaattgaggcacagagaagttaagcaacatttccaaggtcctacagtgagagaatggtgaaacaaaatctgtgcatttatccattatgctctacaacaataaaggaaatagttgaatatatttggaaaagaaaattagactgttaggctaatgactgaggctctcactgtgtcctgacctttttcaaaccctgaatctattaatacggtcagataaatctggttcaaatgaagattagtaggtagcactaaagaagaaaagaaggtaaggcaacctcttaaacacctgaaacctcagtggtgtgtgtgaaaatgaagccttcagtcctttttccccaagaaaagctcgttttatcttgaggatgaggtgggagcatggtttacttgaatatttccagtcttatttagcctcagcctcttcttcccttagtcactgcatgcctcccttagtcactgcatgactctgcctgaggccccaggaagttgtacatatttgctttagaccctgaatgtccctggtgatatttgggatgacctcttgttgtactgcagccctgccgatacactgtgtgtaatagaatagtgcctgactgcagagtgtgattcctaagggcttctgctttcaagtcaaacagagcagattcagattctcaatctgcttatatgggcaaattagttagcatttttaagacttgggttttttttttaatctacaaaatgggtatgtagcacatacctgagtctttgagagaattgaatgtaaaacgttttaatactgtgtcaggtagggaattttgtcaacactaggcactaaattttgttaacactaaacactaaaaactttgaaaaagattggtttgctttggatcattaccaagcactttcatcactgaaataacaaaataaactcagttgttatcatgacaaatgccctgggagtacttttcagtataataaactaattttatttcttcattaacatgtgtactcctgggtgaaccctactaggactgggaagagcaagccgtggaaaggctatagggcttgcacgtacaagaaaaacatgtgtctataaaatagtacactgctgtgtatttatctaagtcagtatgtgaatgcagaatctgaagctggactcacccccagagcatgggaatccccacaagagcatgccccaaactgtcctgagatggagccagttgagattccaaagaaagaagcccaaataccagggtgatctgtccaaaacacttattaggggaacttacagagggctgcagcagtccttgagatacacaagacaaaaggggcgttctacgtaggtttgtctgcagaagcgggtaagggtagggagttcatatgagggtttcaggaattcagctcagggctagagccagttagttttagtgttttggacaacgacctagatgcctttattagtacttaggaatgttcaaagccccagtttgggttcaagcctgctgggaaaaacctgcgtctggccgggtcacgaaatggtcaaggcagtctgagattttcggttaggacacagaaagaaggtgtgtgtgtgggaggggaagtggggggacactactgtgaatgtgctctgtagattctcaacttctctgcaaatctaagatattatttttataatttccacaggaaatctgagattagtttagtcaaggaaggccgagaggaagatgtcttgccattatatcttaaggaaagtagatggataggattggaggaaattggaatttgagcaattagctgaaaaatgacaaatgtatattgtaagagcatatctgataaggaaaaaatgaccagtctgatagcactggatatttgacatctatctgggcaaatcaatggagccttgagtgctaggtagggaattctgggtgatattcagttggcctcagcacatctgttcttgggttctccagggaattagcaagcaacattttctttactgcatgtggaatggcaatggcagattaattgtgtcctctactccagctcttgatccaggcacttatacaaggactatttgccatggtccctcctcctaggttgcaagcttgctctggattatctgatcatggtgggtgcagatgtctaccattttgaggacccataattctcacaactttctatttccccattctgtttttggtgtgaagcagtttctcctttacgattctccaaacaaagagacttactatatactttcttctggacatccactcacataaatgtggatatagagtaatttctggggagttaatctgaattgactcatatgtgattagcacttccttattgatcaaggtgaccaccaacctcttatcattagtgcagaaaatcattttaaaatttaatctatggcaagacttctagctacattaaactgaaccatgtagaggtaaaggtaatctgaaatgcactgtcagttaccatactgattccaagaatagattttattgtatttattcattcaacaaatatttattgagtatctactatgtgctaggtcctgttctagctgtgggaatacagtagtgaatatgattaaaaaatcattcctggccaggcgtggtggctcatgcctgtaatcccagcactttgggaggctgaggcaggtggatcacgaggtcaggagattgagatcatcctggctaacatggtgaaaccccgtcactactaaaaatacaaaaaattagcaggcgcggtggcgggcgcctgtagtcccagctacttgggaggctgaggcaggagaatggtgtgaacctgggaggcagagcttgcagcgagctgagatcgcaccactgcactccagcctgggtgacagtgcaagactccgtctcaaaaaaaaaaaaaaaaaaaaaaaaggagtcattcctgatgtcgtggagcttatattttggtggaaggagacagaaaacaaactggatgaataaatgaaatattttttatgttaaatggtaggtatggtcgaggagaatgttgagcagaaatatggaatagagagtgtggtggagggtttcagtttcagatagagggatgagggaagacctccctggcatgtcattgagcaaagaccttgtttgatatgatgtcctaggcttgtattctccctctcttgatgattccatgtttgtcccttccaacactgttacttgataaaagtggaaggaattcctggataagactgtcctctgttcggtagtctgtgggtagccccaattacttgatagaagctccaaataagttctcaaggatcacttacaagaaaaagtggggttgtcaggcttaagttaaaacatgtaattctgcttaagatcaggtctcaaatagctaagaccaagttctggagttagttataatggtttatcttacccaaaatacccacatcaccaacttaaaacaatttaaaacatttttgtgttatccctcctccataaaattgattctgcccttagcaattatctgacattaatttatagagtaatttcatgttctagttgttttcccaagacatttccttgtttatccatttactatttgattttaatacaaattataattttctttttatattaaaaaatcttttgattctagtttgatttccttgacaaatctccagtcagggggacatctctgacattatatgaataatgtagttgatacagttgggctctgtgtccctacccaagtatcatctcaattgtaatctccacgtctggagggaaggacctgtaatccccacatgtcaagggagggaggtgattggctcatggaggcggtttcccccatgctgttctcatgatagtgagtgaattctcacaaaatctgattgttttataagcatctggcatttcccctgcttacacttctctctcttgccgccatgtgaaagtccttgtttccccttcaccttctgccatgattgtaagtttcctgaggcctcccagccatgtggaactgtaagtccattaaacctcttttctttatcaattacccagcctcaggtatgtctttatagcagtgtgaaaaaaaaaactaatacagtactatattatttatggcagggcatggggagaaagagggagaaagaaaggagtaagagaagaagaagaagggggtgagagaggaagagcaagaagatgaaaagcaaaaatatttaaaaaaccgtatttttagtccgccatttctatttagcaaacttatctggttatcttttattacctgggactctaaggcagaatcattacagacagattttaaatttaaaaaattatttttcacatattgtttgtataccaatgtcttatacttgtttcatataatggcatttgcctttagcttctacaacctttgcagtcttttagtttgaatagagtttgatgtctactgcaatgtaacatgtacaacaaattgttaatatttcttgaccaattcaaaacatgtatcagggattatctcagctatttgatagattacctttcatttcgttcaggctatggagatgaaattagaggcgcagggttggtgtgtggagatgggtattgacagtcaattctcccagataatataacaggtaagttctgataggcaatgatgctttctccttcttttccattatgtattttcctgttggcattaatcatattcctcttcttctacagatttacatacaaatatatatataacatacatgtgaaagactattattctaggcattgagttcagaaaaggtcttgtcctcaagagattatagtctggtgagggaaacagacattttctttcatagtaggtatcacagtttccaattatttatttgcatgctaaccttcaatatttgaataaattataagaaaacaatattttcaggagactgcagttagtttttttttttgttgtttttttaatgagcatagggtactgaatatactgtgggtgtcagaggaagtctccttgaggaaacgtgtttggataggaatagtcagatgaagtggggaggtttgtgaggtggaaaaaagttccaggctgaggaaacagcatatgtgaaggtccagtggggacagagatttgaagagatgaaagttgtgtaagagggagagggataataaatgaggcttaagaagtatgcagggtcaaattacattatgaagagctctgtgggccatattagttatgacatggaagacttttaagtggagtcacagacacaagcagatttgagcatttgaagagtgctctctttgctatgtggaaaatgtttagggaaggataagactgacagtgaaggtacaaggtggtccaggagagacatagtggtgacctagactagactgacacagttagaagaggaggggatgttctcaaaaacagtaaggaggtaggtagaatctgcaggactcgtttgcatttggaagatgaggggaatgacagtcaggcatgattcttgctttctggcttggatgcctgtgtgggaggtggttgcaattttagagaaagagaacactgaggaggaacaggcttggaaggaagaagttgaattcatctgtggacatgttgaatttgaaatatccagcaggcagttgcatacatatgtttattgttcaagaaataggcatgggctggaggttatggtgagtcctcatcactaaataggaggataatggggcaaagagagattctaggaacaaaccttgacaaataccaacaaagaagaagtgaccagagaaggagcataatgataataataataataatagtggtaaaagttaaaacatatatgacacttactatgtgccaggcactgtgttatgtgtttttacatatattagatcaatttaatcttcttgagaggttggtgctactgtgatccctgattttacagatgaaaaatatgtgagccccagaaaggttaagtaacttagagactgtcaccaaccagtatatggtagagctgatttaaaaccaggcatcctagcttcagagattgtgggctttttctgtatattctactggaaagcatgggagtgcactgtccagaaactctgggaagagagggagttatcagccttgttgctgcttagaggtcaaggaagattaaggctgaaagttgccccttaggtttagtgacatttgccatttataagaacatgcttgctgtcatgacagcctgagaaggcagacagcagtaggctgagggcctcctgggagatgagtagtgtagtgtagatgatgctgtccagaactttggctggaaggtgaggagctaggactaggagaattctcaactcctcatgactgggaaaaaaggcatggaaaggatttgatttcggggcagagcagagaggggttctttatgagaggaatgaaattggtttgatgcctatcagaactctcctgttatattatctgagagtattgactggcccatttctcttattctagaaatcgttttctagaaggaagcgggtatggcctaacatatttataaagtaatacttgattatatgttattgaatttgttggtttttaaaaaaatctctacagctgggtgcagtggcatgcgcctgtagtctcagctacttggaaggcagaagtaaaaggatcccttgtgcccaggagtttgagggcagcctgtgtaaaatagcaagatcctgaagatcctgtctctaaaaataaacaaaaacaaacaaacaaaactccgcagccatacaatgattagttgactaccattacctattagtcagcagccttaaatttggatgcaaaacctatggccagaaacaaacagatttgtgacttctctcttgagaaccttgggaacaaatacattatgaattttaaccagccataaatggagtgctttcacccagggcttttccttgtaatttcaatcaggtttaattttgaccgtaggcttttgtctaggttggttagatcaccatctctgttataacctccaaattattaaaaagctcttctgaaagattttatggaaggttacggcatgaaatggcctatttctctgtgggaaggcagggctcagaaaaatgtgacaaacgtcacagtggaactgtgctgtgtcaaaccacaagtggtgcctccatacgaaggtggactgaaacgtatcctctaaaattaggtgtaatttcatgggtgatattctttcctttttctattactgagagctgagattactgagaacacttttacattgaatgttaaagcatgttgattctacacatttttttcttcccaatcctaaatccacagcatgtgtttgatgagattttaaaactttttagaataattaaaaaaataacttcccaatgaaggagaatgatttataaaatgatgcatttaaatgtaaagtttcatttaaggtaaagtgttatttcaaacaagtttatttaaagttttattaaacttatttaaatgtaatatgcatttaaatataatttattgttttaatatcttaatttttttgtacttctagtttgtgtgtgttgaaatatttgcagtatatttgcatattatttgaaagaaattgtgtaccataaatggagctttgctattatggctaaatgcacatttttacaaaaaagtgtgagattatctgctaatcactccagaatcccatttagtcattaaaaatgtaaagggaattaatgacagaaagatacagttaatgattaaatgaaatgtagttataaacacagcaaagtataagcaaaagcagctaaagcatcaatttggtacagctttttttttccttctaaacaggccttgtagataattatacttcttgaatcatttgtcacattgtacatttgttcacattacctataaagcatatttcatgaggttcatttcatgattgatttgttactcttaataaaaagtgcttgagtctgcccctgttaaaagaattcagtgactttttgcttgagaaaattcatagcgaatattctttgttggatgaaaaacagggcagtgatgccaactgagaacgtttttcttttcagttctgggactgactttgagagagaaggaacaccttgtgctctcatggtgcgctgctcacatcctaagcttagtatcttttctgagagagagaaacatgtggtttttccagtttgggcctattctgacaagactctgctgttgagtttataggctgattaaagggtacagagggaactctgtaattatgctcatacttgaacatggctatatatcatgtttgagaaatttcctgtattcaaagaaaataaccaagctggtcctatgttctgttttgcctgcgtgccactaagtgagaaaatgtatgttcctttcctgcttcagctgttgtttactttgtacagaattttctactcctttgaaaacgaccatttttctgactcttatggtttggtgagagtctgagaaaggctttggctttaagaactttcctggtggtttaagtcaagcttgagagagaaagtcattgttctccctgtcctcatacttcccttttcagcttccttataaagatgggtagttatgacctgcactctagctaagtttatcccaacagtcttgaactacttgtcaacatttatgttttcccactggtattttttttcaaatcattattcattcaacaaatatttattatctattacatgctagctattgtgctataattctaagatgaggatgaaaaggataaagtatttacacacaatctttttgtatccagaaagaacgccaacaagtatgttgaacatattttaattaacttaagaatttaaaaataaatttaaaacacgaattccccattatgactatgtcaaattaacctatagtaatgaaaacagcagtggtctcttgtattaatcggttctcacggtcctataaagaactgcccaaggctggataatttataaaggaaagaggtttaattgactcacagttccacatggctgaggaggcctcagtaaatttcaatcgtggcagaaggggaagcaaacacatccttcacatgatgataggaaggggaagtgctgagcaaagagggaaaagccccttataaaaccatcagatctcctgagaactcactcaccatcatgagaacagcagcatgggggtaaccgcccccatgattcaattacctcccactgggtccctcccatgacgtgtggggattatgggaaatacagtttgagatgagatttgggtgaagacacagacaaaccatatcatccatatagtttatcttagtctgtaccagggcttcccttaggagtgagagagcagagagggaaacctaatgacaaagataaaatttgtgttgaaagcctgctgcttgcatctgctttgattcacttggtaaatcctgttaggttgagaagttcataaaactagcaggcttctgaactatttatgaatttgtacttaaacacacacaaaaaaactgaaaacaagcactgtataaattagttccaatggaaagacattgattattctgaacggacacagcacaatacacctctatgtgacttctcacacatgcagattctcattttcagggatacggacacatgtgtacacacactcatatacagccgcacattcctgtgtattctctttgccggcccaccaaactgaactttcctgaattagggacataaaattctactaaattaaaagtctggagaatatatgcctctgcccatctttatcccagtaagattgaactattagtggcttcattgcttgtgatatttataacattaggtataatttcaaattagcatttgaaaataatataataagagacattcttaagatatgatgggttttcccaaaaagtgctatattgactaattgatttcatttttggaaggtagaaatgaggttatcggtggagactagaggataaggttattcagcaagcctaaggaagaaaggcaaattgtgactccggatctctgcataagcatatggcagatggcacagtggagaacaaggtgataagaacaggcagagaaaagtcacactgtcataagccccaaactgggatctctcgttgctgctggcttggaccaagctcaagaccttgcccttgcccataataaaaagctgcagacagtaaaggctgcacatatcttacttcttacaatacaatgatggctgcatccttaaataaaattgtaatataactgcacaatttagtgtctctagattaaatgtagttttaatctctataataataaaaatataaaaaagggtagaaccaagagatcagtgaattaaaaaccaattaatcagctgactgagatgtgcttaaatatatttaacacatttgtggagaaggttaccataccaatagagtttacaacatttcgtacactttaaataaatattgatgtttgtcttagtctattttgtgcttctataacagaataccacagaccagataatttataaagcacagaagtttattttttcacagttctggaggtggagaggtccaagaacaaggtaccagcatttgaggtctggtgagggccttcttgctgagtcctcacatagaaggtagaagggcaagctaggtgaatactataggaagcctcttttttattttatttttattttactttaagtcccgggatacatgtgcagaacatgtaggtttgttatataggtacacatgtgccatggtggtttgctgcagctattaacccatcatctaggtttgatgccccctcgtgcgttaagtatttgtcctgatgctctccctccctttgctcccctcccctgacaggccccggtgtgtgatgtttccctccctgtgtccatgtattctcattgttcagctcccacttatgagtgagaatatgcggtgtttggttttctgttcctgtgttagtttgctgaggatgatggtttctagcttcaaccatgtccctgcaaagaacatgaactcatcctttgttatggctgcatagtattctacggtgtatatgtgccacattttctttgtccagtctatcattgatgggcatttgggtttgtttcaagtctttactattgtaaatagtgctgcagtaaacatatatgtgcatgtgtctttatagtagaatgatttatattcctttgggtatatacccagtaatcagattgctgggtcacgtggtatttcttgttctagatccttgaggaatcgccacagtgtcttccacaatagttgaactaatttacattcccacgaacagtgtaaaagcgttcctgtttctccacagccttgtcagcatctattgtttcgtgactttttaataatctgcattctgactggcatgagatggtattttcattatagttttgatttgcatttctctaatgatcagtgatgtagagctttttttcatgtttgttggctgcataaatgtctccttttgagaagtgtctgttcatatcctttgccactttttgatggggttgtttgtttctttcttgtaaatttgttaaaggaagcctgttttataagggctttaatctccttcatgaggaaagagtcctcatgacctactcacttcttcaaggacccaccttttaatactatcacagtggcaacacctgaagtttggagaatgcattcaaaccataggaagattttataagaaatagtttttgttttatattattattattactatttttgagcaagagtctcactctgtcgcctagctggagtgcagtggtgtgatcttggctcactgcaacctccacctcctgggttcaagcaattcttctgcctctgcctcccaattagctgggattacaggtgcccaccaccatgcccagcttttttttttttttttttgtatttttagtagagatggggtttcgcagggttggccaggctggtctcaaactcctgacctcaggtgatctacccgccttggcctcccaaagtgctgagattacaggggtgagccaccgtgcctagtcagaaataatatttaaaatgtgtagtagcacactacttaattaaataagcattatgtaggatattgaaataatgttgcccttcaaagacctgtattcaatacaagaatgaaacttataaatgtttaaacatttgcaaaaaaaaaagatagtaattctgggggaagtgttggctagtacaagacagacattttactgtggcatggtggctcggactgaagaaaaaattcatattttttaaaaaatgagataaaagtgagataattttttggggggtgagataatctgtgctaaaaaaaaattaaaggtatccctgtttggtaaacttcacttggaatattcaaagtctccaagatttgtaaaatttaatgaaatatttgactttaggctgggcacagcggctcatgcctataatcccggcactttgggagggtaaggtagggggatatcttgagcccaggagtttgagaccagcctgggcaacatagtgagtcctctctctatccaaaaaaaaaaaaaaaagttagctgggtgtgatggcacatgcctgtaatcacagctactctggaggctgatgtgggaggatggcttgagcctaggaggtcgaggctgcagtgagccatgatcacatcactgtactccagtctgggcaacagagcgagatggattccctactaaatgaaataaaaagacttacagtccttgtatattacatgcattcctgctgcacagatataaagaggctcttaaagttgatttaagaacactgaaagtaatataacaaggaacaaggttgttaaatacttacagtgtagatttaaaatcaagtaattgtgtgtattttctgcaccactggatgtttatacaattgttagcataaactgtgtgttccatttttcattagcaattttatctccctactgaatgctagacttttagttgttatttgttatagcttaatttgtttcccaacagtgaaaagagatatggacttgtagattttcagctatttcatcttacaaagctagtgtaacctgactacagatgactccaggggtatattactttaaaaggaatttggactattactcagcagtctgtaagacacattcttttttcagcatttagggggagttgagagaagctatggcaagccatctcaccattaaatctcctctacaccactgctgccctggctcagacccttaccatctctcagggaagccattgcaattccttccctattggtcctccccacagtgtgacttatcagacacactgaaatcagagtaaattttctagaatagattagaccatatctcttccttgcttacatgcatccagtaggtacttccataaagccgacattttaaagcacagtagtcaagtcacatagtcttgccagcctcatcttctgcccctgtgaacccgagaccctgcttgttccccaaacaagccatgttctttcatgtgtttccttttgactggaatgttctctacttgttaactccagcctctgactgggtaaggcacatacattttgcaatgtcattgcctctgtgaaggtcttcctggagtttcccacacccaacaaaaatattgctgtattttcttggtcccagtagctctacaacatatctttattatagcccttaacatttattgtaattttgaaatgtctacttccctttgactgagaaattctcaagggtaaggctgttttcttcttgctggtcctctgacatgctgcatgaacacagtaagtgctcagtataaattagttgacaaatgattaaattatgcttagagtttttgctttataaaagtttaaatattattttctttgtgtataatttatcctatttgatactaacacatatgtattactattataagtcattttagcattgtttaaggaaataattatggtgacatgaattaaggggcaatattctattccaaattgtttttacttaagagctgctttacattgaaactgcaacaaaaataggaatgttctaatgtcatttttattttaaaattcagatacagtcatatctttttgaaatctattaattcttaggtctaagctcatgcatttttataattaacactcataaatagggctgtatttagtaacatatttgttgatgatgttaattcaataaatgaaatttcagaggcagtgtagtatggtggttaagcaagctggctttagagctaaactgggtttaaatattgcctccactaattactggttgaataactttcaaaagctactgtgcctcaatttctttttcttttgaatggagataatagtagtgaccttccttataggattgttttgtgaattaattatttcatgtaaaagtgcctgggcacccagtaaagtcagtaagtactaactcttattattattgttcctatattactgtactcatttcttcctctgtgatctatgaaatcctggttacttaattattggtgtggcgtgctttattttttttatgagtattttccagtacaagttgcagctttagttggaagctcataggtatagaagaagatttaattaaatttataacagagagagagttggaaattagaaactaaattgaaatctctatttcctttgtgtaaaagtccttgtctgaaacagtaggcaatttagaagtcaatatgcacaaagtgcaatggctcaagtctgagagcttgttcagactgtaaactaaaaaaaatattgaaatggacaagttttgctatgaagagcgagttttatagtctatgtgtatatgtgtctatgtgtgtgtataaagatagtattttagaaagtacctagattgcacctagattgtaagtagaggcaaggaattcataatgaagaattcctggaaagaggactaagaaatcggggggaaacaagtttattaataatgctctttatgatagaatttattcgatggattttatggataatgtgagtttctcaggtttatagagatagaagatattctttttaacgtaataatttatctgattattatgtgagcaaaatgacagaaaataatttctgagaggaaggagagataagactgaatgaatgatacgattaatattttcccagctctaatcatacctctgcttatctgctgccttttttattggacacccccttctagtaactatcaaaagtagtgtaagggacctgaaaacagattacagatcttttttttttttatttttttgaggtggagtttcccttgctcttgttgcctaggttggagtgcaatggcacgatcttggcttacagcaacctctgcctcctgggttcaaatgattctcctgcctcagcctcccgagtagctgggattacaggcaggcaccaccatgcctggctaattttgtattttcattttagtagagaggaggtttctccatgttggtcaggctggtctcgaactcctgactgcaggtgatctgcctgccattgcctcccaaaatgttgggattacagacttgagccagtacgcccgacctaaactagctcttataatgtataaaatgcccttctcttaaactctgatgttgatgttgcttctctaaaacctttgctgggaactttctacctcaaagagaagctgtacagttttattatactatttagatttagttatttcagttttattatactatttagatttggttagtaccagagaattattagtctaaccctgcattctaatgatggcaaagaaatagtcctgcgacatcccacttgaatttcttgtaagtagattatttctctttagattaaaatattatttttacacaaattttctcaatgtatattttctttagtggttcaactcttaattattctgaaatcgacttttgagttatatgcctaaaagtagtatactgttgaataaaatagcaaaataatttttgataatgctattattatattggatcttctttccaggcactaaagcctcagagactatgactgggaactttgtgtatctttagtttaattcttttctaattacagtcatctctggaatttctagattttgtatagactgctgtaggagtgattatgattttgaatctgatagactcggtttaaacattgattctgaaacttgctttttatatgatcttggacaggttagttcttcaagatgctcaacatgatttggtgagatttaaatgtgattacctacataaaacacttagctcaatgcctggcacagattggcaaacaccacttctaattgatgtcagatttgtgccttgccttacctgccatgaattaacaatagaaataaaatgtgaccacatttagagacttcgagatgacacagatcttgcttcaaatggactgtaaggaagagagcaaagaaaatgcttacctttcattaccagcacttcctttccagcatgtatgatgataaatgctaatttttatttatctttgagacggaggctccctctgccacccaggtacccaggctggagcacagtggaacaacctcagctcactgcaaccttcgcctcccaggttcaagagattctcctgcctcagccccagagtagctgggactataggcgcatgccaccacacccagttaatttttgtatttttaatagagatggggtttcactatgttggccaggttggcctcgaactcctgacctcaggtgatcctcccgccttggcctcccaaagtcctgggattacaggcgtgaagctcgcaatgctaatgctaatttttaaaatggatgattttcttccctgatatctgaaaagtaacatttttctatttcctggcataaatatttcaaatatggaatgacttcgatgagcatataagccacatttattagctttaaaaaccccaggaaagagaatggggtttacatcttattacttatcagtaataagatgctgtagtagcatgagaaataatccttgcctgataaaaaaccatctgaaacaaacagtaaacctctgctattgctgctgagtctcagaactgggcacttagtcatacaaacaaacgtggaattgaaattgaatttggccacaggagtgcctccaaggtactgtcgcttcttctcttttgagttcttcaaagaggtcagacttgagcagaaggatgttagacttttttataggcatcgttcaggttgggttgcttcctcctcaccaattaatttatgttagacgttcgtaactgcacatctcctttttttctgctgctttattctctgagttctataaatagaatctctgcagaatgtatgctagctgactagattgtgttctaaaatgcttcatgtgtaagagacatagtctcctgtgaagtgagaagctgatgcagaaaagaaatgccaaggacaaacaaatgcaaatttttctgctgtttttctgatttgtaaacaatgttgtcagaagctgttccttaaatagtttctcatgacacaaaacatgctacagtgctgcttaaacatgtgcactaatttggggctatattttagttatcatggattaagacatatgatttaatggaattatgaatatttgattacagtggcatttaaaattaatctgattatattttacagaactcaatttttctatttaaaaaaggagatctaggatgggtgtggcggcttattcttgtaaccccagcactttgggaggctgaggagagaagattgcttgaggccaagagtgtgagaccagcctggaaaacatactgatatcctgtctctgtttaaaaaaaaaaaaatttaaaaatttaaaaggaggtatgttacaaatgagagcagtacatatctgtcttggggttacaaaacaggtttacaatttatttaggatatttagtagaaccactcatatagattcttttttttttaattatactttgagttttagggtacatgtgcacaatgtgcaggttagttacatatgtatacatgtgccatgctggtgtgttgcacccattaactcgtcatttagcattaggtatatctcctaaagctatccctcccccctccccccaccccacaacagtccccagagtgtgatgttccccttcctgtgtccatgtgttctcattgctcaattcccacctttgagtgagaatatgcggtgtttgtttttttgttcttgcgatagtttactgagaatgatgatttccaatttcatccatgtccctacaaagaacatgaactcatcattttttatggctgcatagtattccatggtgtatatgtgccacattttcttaatccagtttatcattgttggacatttgggttggttccaagtctttgctattgtgaatagtgccgcaataaacatatgtgtgcatgtgtctttatagcagcatgatttatagtcctttgggtatatacccagtaatgggatggctgggtcaaatggtatttctagttctagatccttgaggaatcgccacactgacttccacaatggttgaactagtttacagtcccaccaacagtgtaaaagtgttcctatttctccacatcctctccagcacctgttgtttcctgactttttaatgattgccattctaactggtgtgagatggtatctcattatggttttgatttgcatttctctgatgaccagtgatggtgagcattttttcatgtgttttttggctgcataattgtcttcttttgagaagtgtctgttcatgtccttcacccactttttgatggggttgtttgtttttttcttgtaaatttgccatatgtagaaagctgaaactggatcccttccttacagcttatacaaaaattaattcaagatggattaaagacttaaacgttagaccgaaaaccataaaaaccctagaagaacacctaggcattaccattcaggacataggcatgtgcaaggcttcatgtctaaaacaccaaaagcaatggcaacaaaagccaaaattgacaaatgggatctaattaaactcaagagcttctgcacagcaaaagaaactaccatcacagtgaacaggcaacctacaaaatgggagaaaattttcgcaacctactcatctgacaaagggctaatatccagaatctacaatgaactcaaacaaatttacaagattctttattatccaaagttctaagtcattgataccattctttctgacaaaaagtgtagatattctatttgatttggttattagagtatttgagagcctggaatagaaataagcctcactgctgaaactgtgaatcaagttctatcactgcaggctctcattaaggttttgaatcataatacactgtagttgcaattgcatcccaacaatctaggtgcagtggaaccttatctctttgatctcataatttctgaactatagattgggagatatattttcaaattaaagaccatgttaactggaaaaacctaagatatctagcctgatagctacattttacggatgtgaaaaaccacagattggatgagttagctgacttgtctaaggtcatacagccacttagtaacagaactagactccaggtttcgtgcctcccaataccaccgttgctcttgaagtttgactacttctcattactttcaagagctttctctaaggagacaactttttgaaacatctgagtctgcagcagagactgagaaggacttgggtgtaagtggtatattttggaagtcactttagagggacaggagtgagggagagagtagaaagagagatagaggaagaggtttctgccttgggcagtagggcttgattgatcaagacttcctgaaggcaaatcaggtatcccagggttgtctttacaaggacttgaggcagaagcacttgggagcattagctgccatccctcattgattgaagattgcccctggggacattaactcttctagtacttcagaatgggcttgttcaagggctgagcaggtttccttggagttgagaaggccccagccataaagaagaaaggtatggtgcctcctggattcaggttgctgccaaaaaaagtcatgtctgagcttgtttggaactgtccactgcagctgaggctgaaaaatcagagatgagtgaaaggaagtggctaagggcaccaataggggctgactttctcataatatcatgtgattgcactgcttcaaatttttacaatggaatgacttagaaagttccatcccttattcaagagtatttattctagttattttgcatgaattttctgaaatggagaaatgtatgtctccatccttgctaggtgaggaatgttttcagtctttggactctgaaatgaattttcagcagtttctctctataattcctgttctgttcttcttcacttctggccccggcacggcttctccctttacccttctcagttaatttgcctgcctacttcccatattctcttgtgttccctagttctcacctcccaggtccaccttacttgtctcttcctttatcaatagattttccattctccaaccaacgttttacccaccctgtttcagtggaagtgatgtattgaaatgctattttaatcttttgaaactttgaactgaagaatgagtgttggtcccttctgctatttaacttctgagataccctccaactcagaggttcaataaacatagattcaataaacatagaaaactccgcctttctacttagagttggaagggactttagagataatctaggctgtcccactttaattttcaagtgaagaagtgctatggagagagattatgcaacctgttcaggtcccacaattagtaatggcagggctgtgatgattacttagggatctttccaatgtgtcatactgccagcctaatataaattattaatttatgtaaatgtctgtaaattgcaaacttctggtggctagaggctagatctatttacttgatttatgtaagtgctaccataggcacagtaatagataacatagtaactgtcagacaagatcagagaaacccttcaaatgatgcaaggaaatgggggacaaggcctttctgtcatctcttcttctttttccactgtgtgactttgggcagattatttctccttattatattatttagctttctcataggtcttcccatggattactgaagtgtttaaatctatactttaaaacgcatggggcaagagagcctaaaatcagccaattttttataattttgaactttctctaattcaaaatttgaaactttctctagttcaaaatagtttttttagttttgttatgagtgggtttctccaaataccccaaattatgatactcctttaaaatatgtaggcaacgaaaactcactggagaatattgtttattctccagtggttactgctattttgaattctacataaaatcaaccctgaataggttagctgctatataaaatggaatactgtcccctcaaaatttatgtccaccagaaacctatggatgttattttaattttatttggagagacggtctttggagatgtaatcaggttaagatgaggtcctactggatttgagagggcccctaaatccaatataattggtgtccttatgagaagagggaaatgtggacacagagacgcagacacattgggagaaggcaatgggaagacagaggcagagactggagtgatccagctacaaggcagagaactccaaggattgctggcaaccaccagaagcaagaagcaagaaacgaggctcctctagagccttcagagagagcatggtcctgccgatagcctgatttctgacttacagcctccagcactgtgagagaataaatgttcattgtttcacactaagcttgcagcattttgttatggcagctctcagaaactaatagagatgctaaaatagtatagcaaataatttccaggattatttatggcatccttatgtagcctggaagaggtatgaggtcaaccagtcaagactatttcttgagtatttagcacctgctcactaatatgttagaattaatatgttagaattagtaatatgttagaatgtagatggtgtgaaagaaggaaaagacagagtttgaactctaaaggaatttatagtagatttgggtatataaatactacaaaacaggaagcataatcaatagataatatggcactgtactgattagaagtgcagtagtatttcaaagaagaagacttcattgtgagcttcaaagaaatcttcctagaaatacagtatttaagtctggccctcagaggtgggcaggactaaggagggcagagtaatgggcatcttctagggagggagaagagcctgaacgaaagtacgaacgtgagaaggaacctcagatgcatgggaggctgatctaattggagttttgataattgagactaggagagagactctaatagaaaaggaaaagcgtaatagcccagattcatagtggtgccccagagaacaagtgacaaaacgtggttttggaatacaactttgtcagagaatgcagcatactgggtggcagtggtgggcacgcctcttggaaggacaaacctcttttggatgtgccagtgccctactgtgtgattttgggcagattatttctcctttatggactagatagagactgcaaactgaattactttgggataaatccatgtttagtaaggctcgcacatggttaaaaaattttgagtattaattagaagctttttaaaatccagcattaaaaaatccctctcatgaaaaatgataaaatctgaagcataaggtgggcatttctactacgacaacaactggctgccgctaatgccgttaggatggcttgtgtgttgtaggttgccgggattcagctcagcttcctcatgcatctacgatacctgtgtagtccctgtgggcacttgaatttgcagcccctggaacaatctctgtctgccactactgctttcttagtcaatgaccattttcttacctgggatgaaaatcatatcaccttataaattattgttcatcttaataaaagcaaaatgctttgcttttatgtcttatttcgaccaatgagaaataattgcaaattcacctgtatgttaaattcatagtgtttttctgtgtgcatgtatatgcatatgtgacagggagtcagagacatacattgaagttgtattttgttgaatttactgtgagatatccctggaaaggataatttgtacatagatattattagtcatatgaccaattcagatttatgtttatatgtcaattctctctctcttctttccttaagaaaaagttggttttaagttgtttggtcaattttactttagaatagaaaaaaatatataaatgctagggtttaatgcgttgcaaaattttttcagatgtgaatattatttttggtgcatgcagtaagtcatgtattgctaaggatttgctatgctaatatacttccatttgctatctctttttctttgttgtatggtgtagtgtttgatatgatttgcatcgattctggaggaatgaaaatttcagtgtaacatcagcattagggagtagcaacagtgtttgttacagaggcatttctaatgaagataccactctagcagtgacgtcctttaaaaaaaatttatagacaaatgtcatttaagaataggtatagagatttacttgcacagaagagaagagtcttaagtatacaactttttactgctttggggaagaaagtaatactttattttgtatttctatatatctcagaagtattaaagactttttcaataagtctacttgaagaaaagttaatataatctgcatttgaagttgagtgacttctgtatacctaatttttcttgcttgatatgtctgtgtcagcattaaaaatgtattactttgccaaggttatataattttggttatttgcattagaaagcaaccctgtacatacacataaataaaattaacaggcaaaaactattatggtactatattcttgatgctaatttgacaatatactacatcataagtactctagaaaatgtttacattgttgggtttagtattttcctttctgaaatgcatttaaatattttttaattttttaatttttttgtaggtacatagtaggtgtatatgtttatgggatacatgagatattttgatacaggcatgtaatgcataataatcacatcatggaaagtgggatatccatctagtcaagcatttatttgtgttacaaatgatccaataactcttttagttattttaaaatgtacaattaaattattattgactatagtcagcctgctgtgctttcaaacgctaggtcttatgcattttttctaactatttttttgtacctattaccattaaccaccccctccatgccccgcatcccccactaatcttcccaccctctggtaaccatccttctactcttatctccatgagttcaattgttttgatttttagatcacataaataagtaagaacatgtgatgtttgtctttctgtgccttatttcacataacataatgacctccagttccatcctctcaaatgtattttatgtgtgtcatcaaagactatatagggatattcatctattgtaatgtataatagcaaaaattataagcattagaattttttaaaagtattttaaacattaaaaacatttaaaatgttcattaataagggataggttaaaaataattctatgtgttggaatactttgtagacattaaaacctagaaaattttatggcacaaagctttcattttaagaggaaagaaatagaagattgtgtgtgtaatatgatcttaagtttgttatgcatatcaatatattcccttatcactctagatggtattatggttgatttgtaactttttatgttgtatatctaagtattttccttgcatgtattctctttgtaatcagaaaacaacaacaacttctatttctattgagttatatgcagtaaggtcatgtatcttaaatgtacagtgtgataaattttcgcacatgtatatacctatcgggttggtccattttcatgctgctgataaagacatacccacgactgggaagaaaaagaggtttaattggacttatagctccacctggctggggagggctcagaatcatggtgggaggtgaaaggcacttcttacatggcagcaataagagaaaatgaggaagatgcaaaagcagaaacctctaataaaaccatcagatcacgtgagacttattcactaccatgagaacagtatgggggaaactgtccccatagttcaattatctcccaccgggttcctcccacaacgtgtgggaattatgggtgtataattcaagatgagatttgggtggggacacaaagccaaaccatataacctatgtatccaccaaacaggtcaagatctagaatatttccaggagcctggaaggctcctttgggcctccttgcagtcaataccttccaaaggcaatggctcttctgacttctgtcattctaagttagttttgcctgttctgaacttgatataaatggcattatatggtaaatactgtttttgtttcttcttttcactcagcattatgtctgtaaagtccatccatgctgtttttttgtggctgtagtctgatcttttgcattgcttgtaggattccttgtgtgaatatatccaaatatattttatcatctctactgttgataaacatatgtgttgcttctagttttggctcttttgaacgttcttgcacttgactttcagtgaacatatgtacttgtgtatgcatctggggtggaagtgctagatcattggatccctgtatgtttaggtttggaagatactgctatacagtgttccaaagttattgtgacaatttgtattcctaccagaaatgtttctgagttcagttgctgcagctgctacttggtattattgtcagttttagaaatgttagttattattctggttgtatagatatcttattgtggttttaaactgaatttccctaatgacaaacaatgttgagaatattttaatctgctttttggccacttggatgtcttcctttgtgaagtgcttattctactctcttgcccacttttaaaaaactgagttgttttttcttcctgatattgtagctctttgtaagtcctctgttgaataggtagatttcaacatctttccatgtctggtctttatactttcttaacagaggcttttgaccacaaaagattttcaattttaataaggttcaatatatcaaccttttatttttatagttattgcttttatgtgtgttcttttgaagaaatatttgcctatctcaaggacataattcctcttacttattttctagatgctttttaagcatttacatttgggtctgtgatccattaggtgtggtgtcaaaggaaagattagagtttatattattttgtttttcaaatgcagattcaatggatgcagaaccatcatattcctcactgcattgcagtggcatctttgccattaatcaattgtaaaaagtatatctatctatctatctatgtgtgtgtatatatatgtattcatgtatttatatatgcatatgtatgtatatgcctacatatttatgtacatgtatgtatatgcctacatatgtatctacaagggcatacaaatatgtatatacttgcgaaaaacaataaagaatttatgctcataagcttagaataccagcttaaataatatcaacgccaaaagtacacatagctttgtgttccttacactaatgccaggaaattgctgtgaaattgaacatagacaatccaatactgtttctccactattaagtttttaagtgtaagactgacaaatcaatttcctgtctggtcggactgtctgatgctggattcttctgattacaaaacactcctagtgtcgttccctgaattccagctaaaccaggaaccactgtaacatgaatttgggaaatgatctttgttagatatcacttaatatcctgcagtccctatttacattgtttcatctaaatcattaactctgagagaattgtagtgagttagactatgtgaaaaaccttaaatttattgtgaaagagtttgaattctaattttcggacagtattccagatacaatgtaatacatttgctattcacctttcaaccagaagtccggcaagtttcagaaatatttccaataagttgctttatatatacggtgagtaaggagcacttggaaggacattatgggtattttcatatgtgaaaactagtcacacgtaataaaaattagaatatggtatatagagtccaagaaagcatgtactgtgatgactaaatagaattactagtgatgtccatgttagtttaatataaagagcagcatttaaaaccattagttctgtccaaaaatagaagaaattgtttcatgtggtcacaagctgcttgtcactagaagtatttaaactggataaccagtgtcaggatgaaggaaggatgcctcaattggattggacaatggtctcaaacttccaattctatgtccatatatatttattagtacagaatgcacatagtactgacttgtgagtttattagttttgtcattgttaattccagaagaaatcatggtcagataggataaggatgtatacaaaataatagttttttatgagtctgccccattttgagatgctttccttctattggctattttgattcttttataaaataataaaagagaaggtgtagaagaacgagagatagagtctgatcgagggattgatctttctatttgtttcttatgaaatacagtgattttaacacccagacagtgtcttcacacttcctgtcttttgcctgaaagtggaattcttcagtagtcccaagtgttctggatcctgggaccagtgtgattctctttttagagaggcatgtgacagagggcttgcctttgacataaccaaatgtctgtaaccagaagcaggcaacacacctaggaataaagagtctcaccatttctaccatcatacttggggtagaaactactagatatgtagactatttctgcaaagggagagttagaagttgtcatcatttgctgacaaaatgtagttaaatgtagttacagtcctttaaagtctcatttgctctccacaaaataataaaatctgtttttcattgtgacagtgttgaaggtagaggtcctcaaattccaaacaagaactatcctaaaggtatcctataatgtaagatcagtgccattaaaagagtttatatagtcatgatggaaaaactgagaatcataaaagaggtaaagatttaccttggattatctataaaactaatgaataataagacgagagcctaggatttgtggtttataactttctcctccttagtattttatcttttaagcttccttattaatgttgagtcattttttgttgatattaatacatttatactattcaagcaatatgtgttacatttgtttgcatattagcttagatgtttgtttttcaggacaaatatgcacagcccacatggttgactctgttggggtgcatgtatgtgtgtgtgtgtgtgtgtgtgtgtgtgtgtgtaacttaaaactgtgtaatcatatagtgcttgggatcaggtgtcttaatattgtgtatctgtgggtctgactttgatcttggactcttacaggaaacctatataacagcccatcttaaaagtaatgttctaatgttctgacctgtgccacagtaggagatgtggagtaaataattaaaattgccatcatgaaaaacattccacagcaggaaaggaataaagaaccttccttgagaagaaaaaaaccactaaatcacacagtgagaaattaggaaaaaaataacagagagcaagccatcataaatagtgtctcaaggaagtgaactatatattaaaaataagactcaagtttaggaaggtgaaagcatttcaataggtttcaaggctgccagaaattttagaatcaacttttcccttgacatgttatactggtattttcacaatagtaatatcatatttatgttgcttataagaaagttacttgtggtaaatccaatgtactatgcacgttgatcagaaaccttcacacttcatcaagtcattcagtcgtatattacttggtataaaaatggatgacccatattcaataaatatattctctgtattttcaaataaaagccaaaatagagggcattgcaaattcacttagaatgatgttactaacatatgtcttgtgaacccagaaaatcagagataggtctcagttaatttagaaagtttattttgccaagatttaggatgggcctgtgacacagcctcaggaaatcctgacatgtgcccaaggtggtcggggcacggcttggttttatacattttagggagacatgagacatgaatcaatacatgtaagaagtactttggttccatctggaaaggtgggacatcctgaagcaagggcaggaagtctagaaaagggggagggagcttccaggtcagagataggtgagaaataagtggttgcattcttttgagtttctgattagcctttccaaaggaggcaatcagataaagcatgtatctcagtgagcagagggataactttgaatagaatgggagacaggtttgccttaagcagtttccagcttgaattttccttagtgattttggggcctgagatattttcctttcacaggctcaaacagttcaaaggatagtggtgtagtgcttaatctttaggcctgtatgtggcctggcacatattgttgcaagcttaggttgcgtttattaagcacttgctacatgccgggcactgctttaacttcctcccatgtcttcactctgattcttcttaacagttcaatggagaatatccctttattatgtccgttttgtgaaattgtcactgaggaagagagaggttagtaacttgcccaagatcacacaccttggtagcagtgctggaattgaatcgagactaattggctctgggggcatacttttgaccaccacgaacgatttctaggttatagccagaaatggaaaaagccccagttgttgattttctggttacttcagtattgctggaagcatctccttaatgcaattaccgtgcagactgttgaatgtaggctgcaggtggctgaaggcaatgtagcccttggtctttagttcctgagcatatgcctccttcacctattatattgatgcaatgcttgtgcacagagaggtcaagaagatctgcatgccggagttcatctgttctgtgtatctgaccatggtttgcctgccccagcgatggaaaggcagagatattcacgctgagcagcatcagtggggaatgtgggactgctttacagcctcaattactttttatttcagttatatattatgcagtagaacttttaaataaggaggcaagttaccaaataaataacaaaaaaccaaaataggggcaagatatcagtgccagcaaagaatactgtcccataagactttgaatttaaaatgatttatttttttccattttaatgtaaagattgtaggatataaaatgtgtatatgttattgatgagtgtgataataatgatgatgatagcagtatttaaatagcacctgactatgtgccaggagctattctaaggactttttatatgttaactcattcatcaccatattgagaatttttagtattatgaaatgaaatgaagtttactgaatacaatttaaatatcagaacagttagctttaataacttcaattgaataccagttcatattaacaaatttagcagaaaaggtagatggtcatttatttttaaatggtatgctttctttcaaatcccaggtagctttgggaatctttcttctaggtcagcagaatagatgcatcattcccccagtctattctaaactaagctaaaagcccgacgattcatcagtaagtagtttgtgggtattattcttggatagatgcatctaaatggactatttataatttaactaaatcatgtcatgaaacacattctcacttgcaaaagtggggatggcctgcaggaatttatctaaaaatagaggcatagagatattcaattatcatgtcctcttacaagtttattttttccccttttctttttcctctgtctaatcttcaagacagcaattcagcaaagaaaagtggcagcttgtaggaagactgtactcattttaagctatagcagaaatataggataatgccagatgtttcattctttgcaagaaaatgaaatgataaaaatcaatctcttttttcaattagataagaaactctttcttatctcccacccctttggaagcttaaggtattaagagatgtataaagatcacaaatagaggagtctcagcacctactctctattttcaaatgctcacttaacctctattctgaaatttaatgtgttcaataaccattttctttctcccaaatcaattctctttttttgtacttcccttttagtacgaatgatatcatcatttccctaatggactagtgtcagaatctgagtcattttcgacaggcctttctctgttaattgttatattcacctgttggttcactttatagttttgtctgggaaaatgtttcttgcctctataattctgcagctagagctatagcttaggacccattcattgcttcttgccttgacttagacaacagttgtgtgctggtgtcctacctctgttttctctaaatccatctgatgcaagactctgagactactactaaaatctttaatgattccctcttgccttagaattaactacacacttttcaccctggaaatgaaggaccttgacaatattccaccactctactattccctattaatgtcccctatttgcccaacaaatctatgtcccaaccaaactagactcttcacagtttcctgaatgtgagtcatatgtttctgtttttggtctttgcattcttttaaagctatttctttcccctgggataaccttggttctcatttccaccttttaaaatcttatttgcctgcatatgtctgtctcacaccactaactctttctcctttctctaacttacaacattctcttttctttatgcatttctatagccctttgcacttcccttaaagttccttgtgttataatcaacatcacattttataacactggttcaactccctagttcccacactcatgcatacatgtatgagttccttgtaaaaagtattaggccagttgaatggaattgagctttcatcactctaagtacctctcaggtacaaaatcagaaaggctctaagatctgcctttagcatattaaaaactcacctgaaactgtgcaatgtgagcccatggagtccttctattacaaggtagactatgtaaagacatatttattttctaagtaatggaccagaaaggacctcttctgaaaatgtagctcagagaactggaatctcaatttatgccactgtgagtcagaagaagattttgagttttgcttcttttttcccccagtatatcaccctagttatgcttcatttactcatctggctcttcttatgctacttggtttacaatttgaatgactgcccagatttagaaagtcactagacccgtgcttgaattatagactctaagcttatctcagccatgtaaaatacccagaattcaaagtgagatatttccctccacaaagactacatataaatgtgggcacacggagagtaattattattgcaacattagtactcgtggccttcatggcaagattttcatctaatgggcaaaggctatgtcagaaaaatgttagagttcaatctgtttttaattgctgaaattttcccaagtgaacagcaaatatatgccacatttttctttgattttccctctaaggaaatttatttttcattttgttatattgaaggagaaaattataatgtattatagtgtatattttgttttctataatatttctgggcacactacactgtaattactgttttaaaactaatgtaataatatctttggaattcttaaactgatgcaactgatttgctaatggacacattcattcaaagtagttttgagtgaacacattagtgcagttgtttgcaaagtatgatttggggtcccctggaagtctctgagatacttgcaagaaatgtgcaagtcaaaaagtattttcataatactgcaaaaatactatttgcctttttcatgctcatcctttctggaatgtacagtagaggccacatgatatgtgatatcacaatagattgaatgagaatctagctatcctctattaaggaagatattaaatagatttgcaaaaatataaaacactgccactcttctcacacattttaaaacatatagttttttaaaatcatacattaattttgctaacgtttaatgggtttattgtggctacttacattaatatttaaacatttttagcttaatttctgatacagtaaatctgatagatataatgatcataaatagaagctcttttgggtcctcaattatttttaagagcatctgggtaaaaagtttggtaattcctgtattagtgtatataaaatgaagtcccaataatatcaaacaaattatctatttctttatttgccagttgtattattttaaattgtgataatattaagcatgacaattgattccatttccttgattaaaagtgtattacaatagactcctgcttgtcttaaaaagaaagtgattgtctgttttgatttttttttttttttttggagatggagtctccctcttgtcgcccaggctgtagtgtagtggtgtgatctcggctcactgacacctccgcctcccgggttcaagtgattctcctgcctcagcctcccaagtagctgggattacaggcactggccaccatgcttggctaatttttgtatttttagtagagacagggttttgccatgttggccatgctggtcttgaactcctgacctcaggtgattcccccaccttagcctcccaaagtgctgggattacaggcataaaccacggtgcccggccttgattttgttgttattaaaacttaggaaaatgaaatatctcttctgccgtaccactatatttcaggattaccttttcttagattcttaatagttttaattctagtacatgactatcatttagttattgaaaatgattctaaatcttacataatggaaacataagctttctcagaggaataaccttaaaacaaaacagtaagaattgctttaatttcccagaatctacatgactctttactaggttagcatttatggatgggagtcttttcctaatatgaaactaacagggatataacacaagttatatgtattatatatcacattattataaataaaatgtgtttcaacaataggtcagaatttttaaaaatatttggaaaaaggctcagtaaaataaatgttaatgtccttcaagtataatataggtgcataatactaaataatcaagaagtaccatatattttttgtttgtttgtttttggtattactagtattttaattttaaacactctggtgggtgtaagtgatgacacattatttcatttgcaattcctttaccactgaagtaccatatatttttaattcagacaacactgtccctaaaaaataggtggtctctcagatatgcccttgagtgaaaattagggccattggattttcctgagttaagtgtgtaacttatatttgaaaaaagaatagcaacatgttaagtacatcatgagataactaagaggactagaggaattaagggctttgaataagtgaaaaaaatattaaaaatggagacgtttttacagtctagaaaacaaacaggaagaaatttaatattaaattaagaaatacggctgggcgcggtggctcacgcctgtaatcccagcactttgggaggccgaggcgggcggatcacaaggtcaggagatcgagaccatcttggctaacacggtgaaaccccgtctctactaaaaatacaaaaaattagccgggcgcggtggcgggcgcctgtagtcccagctactcgggaggctgaggcaggagaatggcgtgaacctgggaggtggagcttgcagtgagccgagattgcgccactgcaatccggcctgggctaaacagcgggactccgtctcaaaaaaaaaaaaaaaaaaaaaaagaaatactccaaaacaagccacaatggtagaaaatgcagatttgaatagattaagcattaagggtgaagaaacaaaaaacatcttttaacttgacacttcaaggtttaaaattcttcagtggcttcccactgtttttggacagtctatactcttgcatggcacgtgagatctttcacaatttggccccaaattcccattcccatgtaatcttaacttctttccgtgactttattgactttcctttcctcctactgccttatttttagtcatttccaaatacttacttttccagatctctttgtttttaatgtactttccccaaaatctggaatgcctatttcttctgccagaataaaccgttcaagacttggaaatggactaaagagaccactgggtgctatctagaagatcctgtggggactgttgattccataggtgtgtgcagagttgatcgactttctgtcaactagactattctatgatttcgtagtggtagaagttaagttgtagaaaactgatagcagtgcagatgattcttatctgtagcaatacaaatggttcctgttcatactaatgcaaatgaattttgtccagtagcggttataaatctctgtaagtcaaataaaatatttgacacgtgttcattttatatatgaatgagagcaatgttttcaactttttgaaaattattttttagtacatgccttttctaactaccacatataaaactcctatttaccctttgagatgtggtgaaaataccaccttctcagtgtggcattctctatttccccaagcaaaattagctttttcttcacagtgttcccattgtacttttagtctactttcgctactgtgtttatcaaattgttatctatctatctgtctgtctttctttctttctagttttcccactagactacatctttaaaagcagaaaactttttttttcatctttatatcacttcttcctttgccaagcatatagcacatgacttataaatgtttgcttggtaaatgtttattgatgaatgaaagtcgaagtcacagaaaagggtaatgggaatattttagcaattgttgataagggggaattggttacttagagcaaaaaacaaaatgatgttttcacttgtagactttatggaaaaatataatttagcatgaaattgaaaagagttgaaggaagaagcttaatgaagccagaatgacctaggagacatgtggattaagagagctgagaattagaggctcgcactatggctgttttcctgaactgctgcagtcaagacatttttcttctgtcatactttgtgcatttgtaatttaggggtaataatgattgtaattatccagacagaggaattccggtaatgggatgtttgagtctaaagtggacaggaggcagccttacttggctcattttgctatgagtgaggatgggagaaatttaaaataaatgtggcttgaaataaaattaaacagtggcatgaatcctcactgtgaatttgtaaaagtctttttcttggggattagcattacctccacttccttaccattttatttttattttatttatgtactttcaggaactagtttttggcaaaataggcagtcattagaatgaatagatagactggcttttgtcaggtattctgcacaattacatttaattgtgtttgggtaccttaagactcagatgtttttgcaaagatttggatgtttttttctgaagcgaagagtgatttccagtatttactccctaaataggtcacttacaaatagtagacttaaaaatcagcagtaaaatttgaatttatgccctggcaggtgagagaactcaaactgtttactaacacagttcactgctgtttccatggcaacagaggccagtttctgtcagtccagagtcgcttcgccagttgacttcagcagtgaatgctgtgtggtgttgccaaatgtctggcttctgtgtttcctgttccaagcaattgtttcttatcctgaatactaatgactagtctacaaaggctgtggttcagtaccactgaagacaggactgtgaatcatacgtagaaaactagtgagcgttttgcctgtagtgaatttaaaactatatgtaattggttacattctctaactagctatgccagtaatttattaataatattactttgctattattaggcagctgggcctaaataagaaatgacagcacagctgtcatcattgaatcaactgctttttcagaaaggcttgctgacttcggctggttatcaccatcatgtaaattcaaaagattgtgcacatgtatgccagcagaaaaataaaattgcaactggatttttttttttgcttttaaaaatgttcatatattgattgttctgagatggagaaaaagcagctgcctgagatgccagtgaaatggctgagaaatttaaaatgagagaaaaaaagtaaagcattcgaatacagaaaaaagctaagcagtttttgctatttaaaaaagaggagtactgtgatttttttaaagttctggttgtgtagtggttctcagtgtggagaactgggacactctctgcctggatcataccctatatcagacatttgagaaccagacttgttataattgtgtttctctctggagcataagttctttgagggtagactgttttcaccattgtatttctgacagctagcacagagcctggcacacattgagtgctcaataaatatttgatgaattaaatgaaactcagtgagtccctggcaaggagtttctggtatttaagcccgtcaaatttcctggaagaagtctattagactcttcccttcattaaagaggataatagatcattgctaagtatattatatggagcttcagttgacagttacgtatggctgtggcagctccaagactttgttttcagcagacaccactcaaaggtggctcttctcatcatttttttttttctagctagtggatccattaataatagcttttggtggcatcttttgccatttctaactcttggcttggccatcccctgcagaactttcactgtgaagaaggttgtcttcttcacagtgaaagttcccattagtaattttaggaaaacatttccagtgttcctttccttgtgccaaataccagccctggttctcaactggggaaaatttcatctgccccgcccctgcccaatttctcccactgggcatttggcaatatctggagtcatttttggttggcagagagtgctaccagcctctagtgggtagaggccaggaatactgtgaaccatcctacaatgcatgggagagcccccacaacaaagactgtttcagcacaaaatatccatggttaggaaattaagctcttttatgaaacttgctcaaaacccttcagaatcacaccctatgccttccttatctcctttttggaactgttccctctctccccacttaggcttagcttgttgtttttttttttttttaatactttaacaatttgatctctcttcctcagaatgtcaagatgttgtcatgaagagagagagagagacagactctcagtctttgctaccagtgtctgaacttatcggtacatagttatcttgccggtagccccacattccaggtggtggaaaagcaaatatgcgaatcaagttccagaaataatcaatcttgatgatcccattgcttttaagagagacatgcaaggaatgctctacaaatatagcacatggaatgtggaagctgctctataaataataaatattttgtattgttctacaactttttcataaatcaggaattttaagttgggtatttgtgtattacatgaaattctataaagcaaatgtgacttgacagtcttaataatatcattctaaggaagggcttttttttttctttgaaaactccaaattgatctaaatgatattgtaggtattttaaaacaagaagtgagcattttaatgcatgaatatggggctcaaattttgaattctaacatgaagaagataattgcacagcattggatagtcaggcttttctaagtcattaagaagggaatactgatcatcatttgttaatgatttcagtgacaaagaagggcgggaagcatttcacttttaaaactctttacaaatataaactaatgaatccttagaacctcttgtaagaaatgtattaggccaggtgaggtggttcatgcctgtaattccaacacttttggaggccgaggtgggcagatcacttgaggtcaggagttcgagaccagcctggacaacatggtgaaaccctgtctctactaaaaatacaaaaaatagccaggtgtggtggtgcacacctgcaaacccagctactcaggaggctgaggcaggagaatctcttgaacctaggaggcagaggttgcagtgagcagagattgcaccattggactccagcctgggagacagagcaagactctatctcaaaaaaacaaaaaaagaaaaaaaataagaaaggtattattgtctctcttaaaagatgtaaatacggtttaccatataatattctagtttagcaaattcatgaacagtgattatgggaagtgtttctgctctcaaatactataattaaactcttttcctggatgctttctttgtaaatagcataatatagtaatttctagtatttgcctttaggtgactagtcttgattcatcaagagaaaggaaatttggataataaatgtacaaaatatcttagtatgtctaggcctctataaaaaactaccatagactgggtagcttatacataacagaaatttatttctcacagtttagtagggtgggaaatccaaaatcaaggtacaggcaaattccacctctggtgcggtctcgtttcctagacaggcatctttttgctttaacctcacctgatgaaggaacaagggatctctctccagactctgttataagggcattaattcccatttatgaagaatctgccctcaagaccccacctctgaaaaagtatcatcactatggggcttaggatttcagcatatgaattttgggttgacatagacattcagaccatagcacagtgtaatgagatgacttaaatatatgttgccaaaaaccaagtctgtaatctcttttccttttaatttttatttaaagtttatttcgaaagtttgctttcatgaatattcacatacttaaagttgcaaaacaaggctttttttactgcttttattctgaaaaacaaaattccttattgtactctaatcactatttattgtaccactaaattggttcaaattttagacacatatcaagaagtttatatctcacaagtattctaataataggcaggcccttcaggtttcttttcttataaaaagaaatttagaggttacattagcaccaactattaatgtcagcttcaaggggaaaataaaagaagcaggaagctctctactttttctgtcctcatttttttccaaaccatttcccagctttcctacctggttctctacagagaactgaatcaaaaccactgttctcatgatctgctttaagtttttggaatttgagtacaaggaaaaagaagaacaaaaataatagaagacggttatgaaatggtaaaagttgtatttgggccagtcaccaagaattcaggagcaaatatccactgactgtctgaattaattctgatcacacactaatggcaaaataaaagataggcaaccaatattaagtgtctactatatgcctggcactgagatgctgtgagagacagtctctgccttcatggagcttccagagcaggagacaagtggagcagttgttagttcaagtgcttgtggcattgtctgcaaagagtgaaggcatcatcaggaactggcttcagtggtttcctgaagctcagcactctagccttcctgatggctagaggagggtcacaggggtggttaatatgagagtagctttgtttatttaaaaataatagaaacttcagacctatttattgtattattgagtatcattcttatatatatttttaatgtttattagtatcttttttatgtcaggatttggggaggaattcaataattaatattgtcatagcccctcatctggaaatgtctacaaactattggggaacaaaaacaagaaaataggaaattgtaatagagtgtgatgaatattcggctgggtaatctggattgctgtggaggtacatagagaggaccacagggagttagcagagactagagagtaatggacatccaagagtcttacagaaaacatggaatccagcaggtcaaatcaggtaagtggagcagcacgtcaggcagataggaccacacagacaaaggctctaatgcaaatggaaacacacagaagcacaagcgttcaaagagactgtgggataagaggagtggaggtgaggagatgtcagccatgaacctggagaaataagcaggggccagtcatgagagatcttctatgccatcttaggaaacttaggatttatctagacacaaagaaggagccagtgtaaaggttaccagagggaaatgatgtgaccagatttatgtttgacatcgatcactcttgctgagatatagggaaaaaattagagtaaagagtagagataagaaaaatcgtccgggtaataacattgaatactgtatacagagccaattataggaaaacaattctcattagtgatcatttttattgtaaaattatttaagtgggtacagacataaaactctatataggctgggtgcagtggcccatgcctgtagtcccagcactttgggaggccgaggtgggtggatcacgaggtcaggagttcgagaccagcctggccaacatggtgaaaccgcgtctctactaataatacaaaaagtagccgaccttggtggtgggcaccagtaatcccagcagctactcgggaggctgaggcaggagaatcgcttgaatccgggaggcaggggttgcagtgagctgagattgcaccactgcactccagcctgggcaacagaacgagactctgtctaaaacaaaaacaaaaacaaacaaacaaacaaaaactctatataacatctttatgcttatagtttttatgtaactataaaaccaacggattgacaaattaccaaccagatttaaaaataataaaattcaaattaacaacattcaattaatatgaaagatggtgtgagtttcttgaaaatacatccctgattttaagtgtcagtggttcttagagggtggtcctgaccagcagtactagcctcaccgaggaatttgttagaaatgctaattttcaggccccaccccagacctaccagtcagaacctctgagggcaggccaggcagtccccgtctaacccttccagaggattctgatgcacacgaagtttgataaccactgcgtagcaagtgaacagatggatctcctccaatacgaagaatacaagacattaatttttctgaaagcagaaggtcctaggaatagaatttacaaaaattgttttaaggaatcatgagaaatgcacatttagcatcatcagatgcataaaatataagaaattctcatcattaactatgattaaattaaatagtagataggaactattaataattctaactctaaggagaattttactatgcttttcttctttttagagtggattagattccttgtcttacccagtctgtggcatgagttttatcatgccacttaaatcattcagggcaaagaacattatatttacattccagttctatgtttgccagtcaatactgttttatgctttttcctatatacatatttttaaaaacatttcacctaacagaaaaattcctacttctatctgctggttccattttatcagaagggtgaaatattttttcatgtcccaccatcatagaagttttccatttgtctgtcaggggttgataagcctggtgcaggaccacccaggattggttcctttcatctcctgggtgctccctcagaagggagcttctgttcttccctaccacttctgaagcctcagcccttcctccttttttgttagtcactgctgaattttctcctgtttcccacaaatccagtcttaaccagtctttaggaacaagaaaaaacaaaacaaaaaaaagtttgcattgcacccaaatctttctttttctttttttttttttttgagaccaagtcttactctgtcactcaggctggagtgcagtggcacaatctcagctcactggaacctccgcctcccgggttcaagcgattctcctgcctcagcctcccgagtagctgggattacagatgcccaccaccaagcctggctaatttttatattttcagtaaagacagggtttcaccatgttggccaggtcggactcaaactcctgacctcaggtgatctgcttgctttggcctcccaaagtgctgggattacaggcatgagccactgtgcccggcctctgctaggttctttgagtctttgttttgttttccgctttgagcagggtagggaaaaaaatagcccttgggatattagtaagagagaaaagaggatgggaaatatagagaatatatatatatataaaatatatatatataaaatatatataaatttatatattatatattcatatataaagacatatatgaaactagaagatatcataataaaagctataacatatttttgtgaaccatgtttttatttcttttgtatcatagtagacagtacacattggagctgcagttatttttctaaaatatttattcagcagataatctttaagcatttattatgtgctaggaactgctttagatattgatgagatagcagtgaacacagaacaaaaacccctgccttcatgaaggttataatgtagggaagggacgctgacaaaaaaattacatccataaaatgtagagcaagttagatggtgataaaattctacgcaggaaaataaagctgggaaggaggttaaggagtagggaggagaatacaagtttaaatgggtggtcaaggagggcttcactgaaaaggggacatttgagtatacccctgaggaggtgagggagcaagtaaaatagagatctgggagagcatcctccaggcagagggcgtggggcccgagggggttaaacaacaaacaccgtgttgttttgttccttcataacatggaagtgaaagtcgggggatgtgagtgtcgggctgtgtcctaacacgtaattaaaccgctttggatggcgttgacattttcaaatctgattttatgctgtattttggcaggtgcagagcaggctttgatgtaggccttatttagctgtaccatgcgagtgatacccttctgaggcctctagcaagttccctgtatcaccggtttttccgttttggctggtgagatgacaaactctatctagcctggtttgagctctgtgaattgcttcaggaggttctttccaaagccttgtggggtttcaaaccaggcctgtgctgatcagtactcagccaaagcctcgaagaggtttctatccaggtttccggagctctttctcttcaggctgtctcctttctcgtattctgccctgtgaattctggccacctcagcctccctggtctctcctctcctcaccttgctgaagccatgagaccactgagctttgttaggcttttcctatcctagtgctttagagctgcctccaggcaacagtttggagaaagtataaagaaaatttgttttcattctttcaaacaacacaattttgctctggctatttttcaatgtcagaaaatacttattcttgaagttttcttttttttttttctttttcacagtaggagggcaattctctgggctgttaatccctcatgggtagaaacagaggttctagtagaacttttgattgccaaactaataaaaagcctttcacaacttaacctatttgtatttatatgtaaactctggcccacacttagaaacctgtataccatggaagcaaaaattctgcccatgagtttcaagttgggttatctcaaagtaaacctaggggcaaggattcaagtgcagagcaattcatttgggaggtgatcccaggaaacatggatggaagagtagggaagtgagagagggaaaggaaagaagacactaaagggcatattatcgactcactcaccagctatagcccagggcccagtcctgccaaggaactctgggggctcctatacagcacacctcggagctaatcacattgatgaggaaagaagccgggtgtatgtccgtggacacatcagccagcatttgctgagttgcttctgtgggtgttaactccgcacttctgggttgtcctgcatgctggttatacatgttccctgtggtcagagaaaagtcctcaggcagagcggtgtagtttggatatttgtctcctcggaatcccatgttgaaatgtagtcctcagtgttggaggtggggcctggtgggaggtgtttagatagaggcggatttctcctgaatggattagcaccatcctcttggtgctgtcctcttgatagtgagtgagttgttttgagatctggtcatttaaaagcgtgtggcacctcccctgcactctgttgctcccactcctgccatgtgaaacgcctgctccccctttgccctccactatgattgtaaacttcctgaggcctccccagaagcagaagccagtgctatgctccctgtacaagctgcagaaccatgagccaaccaaacctcttttcttataaattacccagtcttaggtatttccatatagcaatgcaagaatggcctaacacacagagattctcagatgttgacagtaagcagccttcctagtgcagaggtgaaagccaagggggtataagcagggttactagtattgttgccacatcagacatgggatgcaagttaaaccctttctaaagaagtgctctgtgctccgatttcaacccagcagactaagtagacctgatcaaatagatacaggcttaagtcagtcttctcttccttttcataattattagaggacattctttaaattatttcttcaaagtactgtgaatacctaagctacctggaactcacaaggaattaataattctatacatttgatattttcctgtacctcaaagtttgaaattctaggggacattttggaacattaatttttttatacaaatacatccacacttttattgccttcttaaatagagtatgtaaaataaatgttagattgttctgaagactcagtgaattttatttaatgtgatatgtttaaactatagacatagttgtatttgtagatgtggagagaaaaacatttaggttagatgagtgctctgctagcagcgttcctgacaaaacatcttatggtgacttagttttatgcatttgtacctttctcataagaggaggggtgtagcctgatggcctggacacggaaacaataatgagttatgcaaaaatagttatgagaccagagaccaccaccgctttctctgaagtggtttaattggccctcccatactcaatatcatctccttggccaaagctgtcctcaccctttgacttgtaggcacttttcaaaacacatctattatttcttgttgtttgttttgttttagaaacagagtctccctctgtttttcaggctggagggcagtggtgcgatcatagctactgcaacttcaaactcctggactcaaacaatactctctctgccttctgagtagttaggactacaggcagacaccatcacgcccagttaattttttatttttattttttgtagagacagggtcttgctatgttgcccaggcttgtctcaaactcctgacgtcaagctgtcctcccacctcggtctcccaaaatgttgggattaaagggtgcgcagcccacagctattagttctataccacggatacagttgataccaggaatttcctcattcacttacccaaatgttttttcttcctacacattgttgacagaaggaaatgatgaggattgtgcttcatcatcttaagaatttgtgctagagatatggagagaagtattatattttcttaatagccattgagatcaatacattatatttttctggacttcactcagttgcacacatttctagatgttcctcttaactttttataggaaatagaataccagatactatttttaaaaagtattcttactctaataattagacaaatattgaaaaccttgcagtgttcttgataaattggtgaacttcctataaatactcttcagaatcagcaatactataaaatctaagtaagtttctgtctccatgggctcaattagtgaaataaaactggctcagaaagatatgagaaaaagtccaatgtaatggtcctttttcttgagggaatcattgtgattgcctgaaattgccttccactttaagtacaaaaatttataaaattatccaggaaaagttatatgcctattcacaaattagtttacacttgactcccaaatattgtattttataggaatttatagcattagcacttgcaaaatgagtcattttttccttaacctcttttaatcaaagggcatttagttccttagaatcccttcagtttggaagttagcaaataccaatgcaatataaattatttagaagaatgacagtgcttagaaatgaattatctaaaaaattagaaatttatactacggtataaatgtaaatctacattttttcatcagtagcatctagttttttactgccatgtctcattttgaaatgccaaagctatatgcatttctttaaaaaaatgtgtatagctccattgactactttgcttaaataaaaccttgtactttttctgtaaccactagaccagagttggggcatgcttgggccttttcactaagaagcatttatcagaacattgtatagttgccttagggtaggctgatgtgatgtgtagcacatctatctggcattggccgactcgggacctgtaaaagatttcaacagctgctcttctgaagtgctgtactggtattacacaaggtagattatcaagctagattgaattccataagagtagaggttatgtttcttttgcttatttatccccagtgctgaatatggtgctaatgatcaataaatatttagtgaacagatgacttaatttgttcagaagttttctgatgtttttgctatcatgcacaggtgaagtctgacccagttctcccgctgtctggttatctactcacttgattagacttctagtggtcttgtctatagttgcacttaccatgctgtattatagctttcctatttacaagttttcagtcaccaccagactgagtgttccttgagaatgttgaccctgccttatatattcttgcatcataaaagtctaaaacaatggtttacataatgtctggtagctttttagcaagctagtctcaacattttaaagacatatgcaagtatctgcttccttttacatactagtttttcactagaggaagataagtctatggccagaggtaagcttagatttaaaaatgaaaggaaaaaggtcaactttataaggctgctacatctaatatagtaaatggtggcttcatttattcatcaattcatgttttcaaccagtatttattgagtgctgagtgccagccaggagtcaagcatcattctaagtactgacaaagtcacaacaaataaaagagacccaaaaccctgtgtttatgtattttaaattctaatgagggaaatatgtaataattaagataaataagtaaaacacctagtttattacataatgataaagagctaagaagaatgaatacagcagggagaggggatacagataactgggagagcagattggctttttgatagattggccgttgccagtattaccaagtaggtaattttgagtaaagacctgaagaaagagaggttgccatctatgtggacatctggaacagcattcctggaagaaggaagaacatgctgaatccagtagtcagatctcagttctcaaattacttgtccttcttagcagctcttgtcacagtagatcactctgctaccacagggccactttccagctttcctcttcttttgctgatagctccttcactggtttctccttttcttgatttccaaatgttggagaattctagagctcagccatcataattcttttcttctcactctcctccctgttcagctcatcctatcctgtggccaaacacacttaaatctgtatttccaaccttggcttctctgaaatctagatctgtatatccaattgctcacttaacatttcatctacacagtcaaatactcatctcaaatttaatacgtccaaaatcaattcttagcctcactaccaacaaatgcttcaccttatttttctccacctcaggaaatgacatcattattcacatagttgctcaagctaaaacttagaattgctccacgagcccttttctgctcttccatcccacagaacacccattggcaagtcctgttgggtctaacttcaaaatatttacctcaaatgagtatttctacttctacagctactttactactccaaaccatcaccatctttttctaagaatataaaactaaagaccaatagatataatagatatagcactattatatattataattataaaatgcattataacatacatataatattaatatatttttggaatataacaacataatatattattatataacataatgctatgtatgtgatttatataattataaatatagaaacataatttatcatatattaacatatcccatactatataatgctataactgaaaatatttatgcatattaacataaatatagaaactgtctcctaatttcctccctgcttaactgttgctctctgcctcttcattttccatacagcatctagaatggtcttttaaaaataaaaatctgatcatataatttttctgctcaaaactcttccctgattttgcatccttcagaagcaaacccagcctccttaccatgtccaacaaaaccctatataatctagcccctggctaccttttctgcctcatctcaagacataaccttccctggcactttgcacactcatccgagcatctcctgcctcagggccttttctctaggtgttctttctgccttggatatcctaaacgctccttcactttatccatgtctctgcctaaatgtcacataaagcagaggccatatctgactactctatctaaatataattctgtaccagtgtatagtcccttgttctatttcatctttcttgatagccttcatcaccacctgaaagtatagtgtttatttattttattctttgtttatctttctgttgcctatttagggcaaggtcttttttttttttttacttttatttttcactgctatattcatcctgtttcttagaatggtgcctggcacatatcaagttcttgataattatttgtagaatgaatgattcaagatctctcttttgaatttccataccctcctatttaaaaacctatcatagcacttaaaattgtatctaatgagaagttatttttctgactcatgtgactatgagcctctggaggagaaagactttaacattaatctctgattttccagtgctcataaaagacttgggtacacagggttttttcctaaaatgacacttattgaattaacaattacttggactcatccctccctaaagaagcaattcaaggaacctctggtgtttccccaatgcattaagctagttagagatactgggcatcatgatcatcaactaccttgtcctggatacaatacagcccatctctggtttagaaaatagttgagtgacattcaggaagcatctgaaattttagatcatggtttttatagctaaaaaaatgctaagagtttaagataacattagagcatcttagatttcatagagttcaacattagtgatcactctggggactgttgtggggtggggggagggaggagggatagctttaggagatatacctaatgctaaatgacgagttaatgggtgcagcacaccagcatggcacatgtatacatatgtaactaacctgcacattgtgcacatgtaccctaaaacttaaagtataataataataaaattaaaaaaaaacaaaaaacattagtgatcatctagtcaaatgtcttattttacccatggtgaagctgaggtccagagaggtggtgctattttcgcaggtgataacgaagtcagaactagcgttagttagactgattgcagtctgattctttctccaccataccattttccatatgttactcaatttatttgatcttggtcatcacctctccagtggtaacctcagaagactgtatctaggtaacgtcttaattctactctgttttcacatatagattttctttccatatatttagaagccttgatggtccaagtcagtaagtcacacttttatgacaagaatattaacagtgaagaaacattagatcagacttttagacaaattctaagctgtatctttactccagataccaccaacattattgaacattatcctaacttgaattatttctggtagtgattgggttttctagtagcgatttaaatagacttatgtagtagtgtgtaatctatggattattgggagtaattttaatgtaagcattttaacaatgaaagttgcatgatgcttagaacatatagggacaataaaagtcacaactctcttgagatttttagaacgcctgatgctttgaaatgtgtgttaaagcattactcatgactatttctttcctaaaacgatggcagctgtgttttcctatcttgtgatgaatattcttaagatcaccatacagaaaagagcaagaatgtatttagagcacatgtcaagtttatatggtgcagttttggcaaaagtaaaacaaagaacaaaaactttgtgagtagattctttgatagaaatagttcataattaatatgtacttagaaaactgaaaactagaatcacctccaatagaattacagtgtttttatttaacaatgacaagcagatacaacatatttaaaaggtttttgtgggttgtttataaaggtaaaatgctagatttattggtctatgatcgtagaaaatggattttgttattttaagccttttttcatgatcctctttccttacccggctgggtaaatgttcctcctttttccacttataacacctcaagcaaatcattctgttttcctcattgaactgaaatggcatgtttatactctggtttttcttgaatgcagcttaaagtcccttaaggcagagagatctgatattcaattcctgttaacggtgccagcattttcccaaacaggctcaaacatgctctctacctaccagttttcaaaatccctttggttcagccttaaacttctcttctgtgaggcttgactgacactgagaagcatcatcaacaaactaacagggttattcagactgaggctactattaggtggggagatggatgtgttcaagctccagagatgatgacaaccttccccctctcctcattcctgaagtacttgaggattgcacactgccctcattttgcacagtcttgtgattaaaggcaggagctctggagtcaggctgctccgagtggatctctgctctgccatttactaactctgccccttttagctctttaaccttggacaagtttcctcacttctctctgcctcagtttcctcatctgtaaaatgaggataataacagaacctatatcatctggttgctataaggatgagattaaatgagttaataatataaagtgcttagaacagtgcctggcacagagcaagtgctacacatgttatttgtaattattattattatcattactattcagtaacgctggttctctgggtagtgatgggagagagaaataacagaatctctatgagaataacgtggtagtttctaaaagattgcctccccaaagcctttgttcagggacactgctctaggctagaaatccaatgatgtcccaggttttagatccaaagaataagaagctatccagtgataatctattgctctgtaggccaaggattgcaaatagtttatttgatttattggtttacacatttctttaaaaatacatgtaactgtgatgtttaattttctgtgtcaacttaattaggctaagggatgcccagatagctagtaaaatgctatttctgagtatgtctgtgagggtgtttctggaagaaattggcatttgaattggtggaccaagtaaagagtattgccctcactaatgtgggtgggagtcatccaatctgttgagggcctgattggaacacaaatgcagaagaaggcggaatttgtttctgtttgagctcggatatccatcctcttctgccctcagacattggagctcctggttatccagtttttggagttggattgggactcataccattggcttccctggttctcagacctctgggcttgggctgaattataccactggttttgcagaaggcagatcatgggactttttggctttcataaattgtgtgagccaattcctataataaatctctttgtatatatatcctgttgattctgtttctctggagagtgctgattaatacggtaactatatagatgttaggcttctttaaaattcatgaatgaaatgacactacactcatataattgctctgttcagataggtaaatctatctgagttgtacgtaaagaactagaaagacatcttagaagtgtttttagaggccaggcacggtggctcacacctgtaatcccagcactttgggaggtcgaggcgggtggatcacgaggtcaagagttggagaactgcctgaccaacatggtgaaaccccgtctctactaaaaatacaaaaattagctgggcatggtggtgtgcacctgtaatcccagctactcagtgggctgaggcagagaattgcttgaacccgggaggcagaggttgcagtgagccgagatcacaccactggactccagcctgggcaacacagcaagactccatctcaaaaaaaaaaaagtgtcatttagaatacataaattttgctgaagaatggtctttaaaggtaagattccatgattttggttaaaattagcacattactggtctactctactgcatttattcccaccttccaccttaaatataaaaacaggaaaatatgaaaagccacaacaggaacaaaaatgaggattgcttatttacttctgctagattacaaggatttttcattcattgaaaggccatgtaaataagactgcaaaaggcaatggatagtcctcatggacaaaaataaaaatcctgcttttctgagagtagctatgaagactttttattcttttcttactccaagcccttgacagaattaaagatctatacctactcacaagggattcataatcctcctactgcatatgtactgcatgtttaggcactcaaatgctgttacccaactcttaccagaacagtgttttctatatccatgaaaaggctgactctctgtcgagacagaatcagtgatgacaacagcaacaataattctgataacaatcattagcatcatcattaatatttactgggttcttgtgcaagctgctgttcaaaggacttttcactttagatcttgtttataataaacataataacctatgaggccggtagtattattcctttcctacagacaaggaaactgaggcacagagctctgtggaagaagtatttccaaaatacagagagaaaggacaatgaaatgatgacatcgaagctgatagctatgaaaatcagggaacataactccaaccaaccatagaatggaagtcgttcagaggaataaatgaaaataactgaagtgaatcaattttcccaggcaaggaatggaccgagcatgcgcagctctctgctaaggaagtagaggcagcagaatggagcctctagagtcaggcttgccagaatgcaagttcttcctctaccacagctttgtgttcttgggcaaattacttaactcttttaagccttagtttttttatttgtaaaatggagataataatagcatgttcctcatatagtttttgtgaggattcagtgagtattgcattacatgtaaaagggtatataaaactgtctgatacatagtaaatgctcaataaataatagctattattattaaattgttgaaaagagaaaggaggaggattcatgctcaaataatttgtgaggtgctgattaattgggtttctttattatgcggcttctcataacctttaatatgctaacctagattgtaaaacttcaagaacattctcaggtttatttgacttgaaaaccccccttttcccacatggagcacagataacatctcatgggacactggtgttctacagatcacagtgtaggaaatattctttatttcacacactttatatacaagaatagaaaaacagacatgaaaatgtcttacattgataacctgcactacaagcaaccatcaaagggctatttagctttacaaagcatcatgaatacacttctttctccattttataaaaccatgtatccaggcagtcaaacctgatgaacactcccttttgtcagcatcatcacctggaacactgaaagtgttctcagcactttacccaaatgctgtaaaaaataagttaaaattggcacagctccagccttctgggaaatttactttaccagattataaatccttcaaagtgttttcggttcattgtgtcttatcatgtcgtaaggacactgttctcttgtgtgttgaaattgcatttctcctacgtgccctattttggtattggagtgctgttgaattaacattaaaagaacacactatttagaagttttgtgtctctgctgcccagcactgctggtagattatattgatcagctttgttttatttaatcttctggtgtcaaatgacatattctacatggttttccagatgagttttgttttattcagtcttctcatgttgaatgacatattctacatggctttccagaactgggccagggcttattcagagagagggtaattagcttctataggaattatacccattatacgccattactggtaagctgggttaaggaaatataattagaaataaaactcctgctaaaccagtgaatcctttttataaaaatgtagaaaagaacaaaatagtgtttttattgaataagcattaaatcagactgtgacacacattacagatgatctgctaaggagatgaaaaagagggaatgaaatctcacccttttatacagccaagcagatacaacctattacatgcatgttcattgtctttatcaaaatataaaataaaacctcttgtgtcttaatgataagcaggaaattacatcacggagcatgtgcctagactttgattccatagacatagggaaacaaggggacttccatcctcttggatgttcccatttcaaagaaatgcctctgaagcctcaggaaatacattcctaggatgtagaactagcaagaggcttagtaagctttcaaaaaagatttataaacacctcagagagacagataaagcatttaaaacttcaagtgtcctaagggcgggcagggagaatactctttcccctcttggtgccagggaaaattttaaattatatgtttgttttcctccaaaatctgtatttacctttacaagtttccttttctgttactattttatagttgcagtataattttttaaatgatctccattggcgtttctactttttctggctagtttgcagttgactaaatatccagcaagtccataatacagttatgaaacaagcaattatcagaattacaataggatgaattaaaaaattaaacacaatatttgcctgtgggaataacctttaatatcataacaatggtataagtctccattagaattctgaattcttgattagccatgcataaacattgtccattacacattaaattcacaaaacattgtggagatttctgcttgtgcattcaaatgattcactatttgaatattgttttgtagtttcttatgaaatcttagcctatataagcctgagcaacagcttatctctataatcagatcatctaaatttttaattaagagtttttcttgaaaggccaataaatttctcctgagttcttgtctgtcacataaataatgtagcatttacattttaatctagtcccttcgataattattccatcttcttaaatttttcccagttgtgaaacacaaagatagccatggcctttatctaatataaaagtcttattaaaagtcatccattaaaagttacagattgaaattccagtgtttgatttgcagtgggttgtcttaaggacaaacccaaactatgagccattttttttttgcatcagtccaatcaatagttgtattattataaaagtcaattaagtctccatgaataatagacatctacctttgtttactgtcaatcccgagactaggaaaaacttgtgttctgggcaaatgggacattccttgaaagactatgtgctcttcctcaaggagccaacattccagtgggatttcctttccctttagcttattgtctcaaacaccagctcaacaagcttcattcctgttcaaagtgtggtctgtgaaccacattttcagaagcaaaacttaaggacactgctcttctaagaatttattttattattttattttattttattttattttattttattttttattttgagggggtcttgctctgtcacccagtctagagtgcagtgaacgtgatcttggctcactgcaacctctgcctcctgggtacaaactcttctccagcctcagtctcccaagtaggtggcattacaggtgtgcaccaccacacccagctaatttttttgtagttttagtagagatgaggtttcaccatgttggcctggctggtctcaaactcctaacctgaggtgatctgcctgcctcctaaagtgctgggattacaggcctaagccaccatgcctggtcctctgagactttagaaactgggttatgggatattggtattaagataaacacagcatggttgtggttagttgcaaataacagaaactgacattttatttatttatttatatttttgcttttcaacttctattttagattcaggggattcatgtgcaggtttgtcacagggtatattgtatatgctgaggtttggggtatgaatgaaactgttacccaggtagtgagcattgtaccctataggtggttttccaacccttgcctcccttttcctccttcccccagtagtcccaagtgtcttttgttcccatctttatgtccatgtgtatccaatgtttagttcccacttgtaagtgagaacataaggtatttggttttctgtttctgtgttaattcacttaggatagtggcctctggttgcatctatgttgctgcaaaggacacgattttgttcttttttttatggcttcatagtattccatggtgtatatgtgccacattttctttagccagtccactattgatgggcacctaggttgattctatgtctttgctattgtgaatattactgcaacaaacatgagtgtatgtgtctttttggtagaacgatttattttccactgggtatatacccagtaatcccattaaatggtagttctatctttagttttttgagaaatctccaagctgctgtccacactggctgaactaatttacattccctccaacagggtataagagttcccttttcttcgcagccttgccagcatctgttatttcttgggtttttaataatggctattctgactggcatgagatagtatcttattgtggttttgatttgcatttctctgatgattagtgatgtggagcatttttttcttatgtttgttggcctcttgtatgtcttctctggagaagtctctgttcatgtcctttgcccactttttcatggggttatttgttttttgcttgttagtttgtttaaattctttagagattctggacctttgtcaaatgcatagtctgtgaattttctcctattttgtaagttgtctgtttactctattgatagtttcttttgctctgcttctgcagatctttaattaggtcccacttgtcaatttttgtttttgttgcaatgcttttgaggacttagccacaaattgtttgctaaggctgatgtcaagaaaggtatttcctaggttttcttctagggtttttatagtttgaaatcttacatttaagtctttaatccattttgagttaattttttaatttaaggaataaagagatttgttggaagagcatatgatggctcacagagctgcaggagcactggagatccagggttggaagatgggcgggaaacaacgtagtcagagaagctcacagcctgatttccacttgcggggagtgtggctagaatgctggagtgaggaattttctgcttccttgattctgctaatttgccccttcactcattatcctttcaggaatcgaaattccaattgggagtgtttggttagttgagccccccctagtaatgtcagcttcattgcagcaagagagcaaagggagagaaacagctgtcccactttgtttctgaagtaaaagacagtactctgtcttcaactattctggtgtttctgtcaaatggtactcactctgggcacacactgctctaccatatgctttgcatatattaactcatttatttttacaacagctctatgtggcagatattattcttcctgtttgtaccataaagaaactgggcactgaaagttaatttaattgccccacatcacacagtaagtggtagaaatagaatctgaagctaggctttcaggctacaggatgtgcgtacttctctatctgctcaaccttgactaagataagtgatcagaggcttagaagataaaaaagaaaagaaaacaagatatcaaagagaaaacaacaaatcaataagacggccatcaaatgtgtgttttgtataatgataaactgtgcacatttctgtttttctccatatactataaatttatgtactttcaaaacttaattttgtcataatattagacttacataaaatttacaaagataatatgaacagttcccatacatggtcttcacccagcttccccaaaggttaacactttacataaccatgaaaagccaaaaaaaagaaatgaacattgagacattactattaacaaatgatgaactttaacatatttccccagttttcccaccaatgtcctctctctctttcaagatttgatccagaatcccacattgtgtttacttaccatgtccttaatcccctccaatctgtgataaatcctttgtctttctttgtctcttgtgacttttaacatttgttcaggtagtttgtaaatcatccttccatttggacttgtcttaatgttttcttatgattgattgaggttatgaatttgggggaaggactttttcctgtgtattctatcagggagtacataacattgatatgtcatattactagtgatgttaacattgatcactcagttaaggtgactatatgtttattttttagtaatttatttttagtttttaaaaaattgctaggttaatgcttctgtttgaaacttcagttgatttaacacttccaatatttagtaaattttattcattttttttactagcgggttttgctgtatttcagaaccttcaactcatatagatccctgaactagacataactccttttgcctttcagtcacttactgtgattcagaacatatttccttaaactacacataactaacgttccctgtgatgtataataagctaagtggaagatgattgctccactatgttcatattttggagtagactccatagccaaaggcaatccttattctaatacaaaatgtactaggacactagggagttagtgaattagaataaattctgtctacttgatgggtatccaggccatttcttttgttgtttttgaaagctacatttgttagtaagaacttcagaccaatttggctattagcctaggttttatgtgaaacaatcttggatatttaagattgtacgtctgtcttttgatatgagtaaaacatgccaaaatagtgatgtagacaaagtattgttatagaaaaccctttagcaattgtccctgtgtaagcccatcctcttttgtatgttttacttataactgaggtacatatttaaaaacatcatgatgttatactttgtgatatatatctaaaatttctccttaattttttgcatccttaggagtagtattccatgtttgtgtgtgcttgttttttctttgaaataaatggtaacatctactccaagccttcaacagatagcatagattgttaatgtttggtaaaccgtttgttaacaaaattaaatttagatggttgatagtggagatgtggctaaaggtaggaaaataatacaattacatactcataataagccaatgtttgatgtgccaccatcctggcaatgcttttagatttatcaactagaaacaagtaacactggttattaagcatcttactctgtgtaactttgcttgcaaatataacttaacacttaaaaaaagttactgtctgcttaaccatctagtcacataagcattagtttttatctcaatacttaggcactttaaaaagtaatccaagcatcaaatttaagcttgttatattagcttttaaattattttattagattatcactgctaagagctaacatggaacactggagccctggattttaattttaacattaatatattagaaatcataaaaataaaaagaactcagtttctttcccaggatatgccacagatgatgtctataaacccttatttcctttttcttccccccagtgggtaatagggaagtaggagagaagccattaggcagcagggagcaaaaggcaaaattaaatgcttttgtagacactttttgcactttttgcttcaaccagggagtcggaggttgctgtgagccaagattgcaccactgcactccagcctggcgacagagccagactttgtctaaaaaaaaaaaaaagatggtcacaattggtgctagagagctggtatgagcaggatccaacatatttctggttggagaggagagagaagaggctcagagacaagtaagaggacactcttcacacagggaagagatgatatggtctcaactctattggtgagatgtgagcaacttccagagatgttgaagttatggataaagaagcagtttatagcaatggttaagggttaagactatacatagactcatagacagactttgggtccaaatcctggtgctgcaacttaactagcattgtgatgcagggctgtttattagcctttctgggcttcagtatctcttttctaaattggtgataatgatagaaccagacaatgatagaaccagataatgatagaaccagacactcagcattgttatgaggaataaaggagtcaatacacatgaagtgcttcaatcagtaaaaaccactgtacatgttatctttagccatgcagaggagatactgataattaatgattaacgtgttgatgggtgggcaaggaaggagaaagaggagtcaaggttgacttgtgattttttagactgtccaaacaggtagctagaaatgtatctaattttgataatcttcccagtgactgcttatctatctttgcactgttctgtcagaagcaagcaagcatgtatcttttttttaaacattgggttctctttgttacagcagcttaaactacagatatggcgggctagtacagatggattctattttctctgtgagtgatgagatggaagggttttctgagaaatgaaagttagtaggaaagggcataaggtttgaaaagagtgaaattaatttgaaacagctagtggtcaggggccatgagagtaaagataggtactaggaaaatatagacacattgtgtgataatcttgaggaagtagaagagcactgattcatggagaaaggaaacaatataaatatgaattaaatataaacccaacaaaatagaaacaaaaaactaacaatataggacacaaaatttctgctggaaatatttacagttttcagagttagtgttaaaaatgtttcagcacagtgaagatcaaaagtatgttttcaatgttacaatacttattaaacaacttgtggattctagtattaatataagaatttacaaagtttagggagacatggctgctattcatgtacagccttatagatttgtatgactttaaagaagtaaaataggcattgactgccagcaatatttaaataccaaatcaaatataaataaagtgctagaaacattgagattaaataagatggaacaatgttttagccttatcatgggaagcttcctgaaagaggtggttttttaactaaaactcaaaatggatatatttttacactttggaaactagaacacatattattggttgtatgcttctattttcatacatattttctagtggtagtaggttggagcaaaagtaattgtgtgttttttttggccatgaaaagtagtagcaaaaaccacaattatgtttgcaccaaactaataaaatcatatttgactttaggatctttaggctggggcagatgtaacactacactcatttttcataggctggtgaaattttctctgatatttgctgtcttttgggtcttctacgttgataaaatatgattttatgttaatattcctggtatgagccatgtagaattaagtatttggggtcattcgctagaagtggactacatcatttccttatcacaattttcactttaatctgaaaaattatataggttattttgagttgagatcttctttacattgtagcaaggaaacatctagtgaccttgcattttacacaacattagctacaatcttatttcctaaatagatgttgagataatgtttttcacatttttgcttatttattaggcagtataaaatataattggaagaattcttttaagagcccatcatgatcagaattgcatatttatcctgtgaataaattgttacacatttaatgactgcacaaagtcattgtcacaggtttaattttctttattttaatcaagatcctttattttggtagtgacaacagtttattcatcctggtgaatggggttctgaagatgagtaagtgtgcttgtatatgtaaagccttagagaggctttgttttcactgggaaaatattttaatttgggagtcagagccctaagccaaattccttcttatcttccatttaattgagaaaattgcttaatctcagtctttctgtcaagtttgattgacaggtaactgttggctgtgaggtgactgtaattatgagtaccttaaaatatcttgagactgcttgaagagaggtgatatgtgtgtaacagggacagaaattattaatgtgtgaggagacaggttttcctctgttcctctgcctaatcagtttaccatgcagattggcatcatctttagaggctgaacaatagaattaaggatggataaatgcatggagattttgtcttgagaaaaaaagagaatagcagaggatataaagcaagagggaaaagaaagtaaagtcccgtcaagagaaaagcaagataggaaaggaggtttaggggagaggggtgaaagtgagaggcgagaaagctgaggtgtggggaaaattggcaatcaattggaataggaaaaaaaaagattatacattagatctcttttaacattttccaagagatgcacctaggaattagaattactttaaattacttctggttgctgaattttatttctttgtctatatcactttgaaccagatatttggatttcctggaaaaaaactcacacaaatgataaattagctccttattctgaaatactttagaataatgttgtatcaaaatccagtatggtaaaggtaaaagtattttcatatgacattaatatcttattactcagaaagtctaatttatatgacaatcttgggagatattaatagatttatctccagctaaaactcagattattataacttaaacattttcagcttaagacaaattcagttttatgaagactagtgttttccccttacttttctaacttataattattgtgaaatgtattttaccctttaatagctaaatcaataaaatccattttaagtgaactatttttcaaacaagaattttcatagtattgattcaagataagaatatcacattttgataaaaatcagtgaaactagtagctctctaaatgctgacttttctaatttgaaacttagagattcatcatgcttagaatgctaaagttttctaatgttcttctctttaatatgtaagacacaaagcctcttgaacataaattgcaactcacaactataaggaaaagcaccaatgctttaccccctaagttattttaatagaaaggagtatgagggaggggtattaatgaaaaacaatggcacagtagacaaatcaaaaattgtgcctactgctcattgaatttaatcagtaaggctgtttgataagtagagaagtggaataaaaaagcagacctagatgctaccaggccgttttatgtattacggtaagttagactgaatggctcttggtggtaagtatattctctggagataataggcaccagtacaaaaattttgtactggtttctcctaaaatacctttttgacttctgtgaggccatgagctagttcatatccatgctaaaatgaaacatgtttactattatttcccagttgattttatttataggattttagagaaggagggggtatgaaccattttgaggatttttggatttagctaacaggtgtggcttttctcttggctttgttaactggtcagaataattgcctttcttttgttaggcttttgctttgagcaagataaaattcttctctcacatagcctttattttctttttattacgttagactttgtgattttcttgaagcaagaatgctgatgtgtatgtaccctatattaaaaagaaattgcagatttcaaaaaaatggtaaaatagtgagattccataattaaatgttgtcaccttagtttttccttattttattttgtagcattttaaaaagtgctgcaaaacagcattgtggtatatttattaaaaagaaggctggtatccgtgccatagacttgccatgcagaatgggcagctgtatatttgcagatgactgctaatgtggatgtctggatagaagatcaaattatttgcctagcctagtgcattttataagagcagcagatgatgtaattagctcatcatgcatgcagactccaggatgtgtgagatcttcctatgagacctcctatggcttgggctaccagcaaatctcctggaaaaggtgaaatttggttacaggcaaatgtcatgtgatttgccctgcctagacctatgaaccatttttagcccacttctgtttgggttattcttatacagacaagagttacattaagcaacaacaatgacaataaaaaggctggcaaagtgtaaatgaaaagaattgattttgaagtgctgatcttagatatctagtgtttttatgtttctcggcaaaaatctttcacttaaaactgagtataaatgtatgaaaaaaccttaacctctactttataccatataaaagttaatttgagatggatcatagacttaaacatataatctaaaatcataaaacatttagaaaaaataatatatattttttaccttgagataggcataaactttttagagaggaattaattataaaggagaaaaatatagtaaatcagtcttcatcaacatttaagggttctgctcattaagaaatagtgctggaaagatgcaaaggcaagccacatgctgggagaaggtacacacaatacagaatttgacaaaggacttgttttcagaatacgttaaaaatattcctaagctactatgcagtcataaaaaagaatgaaatcatgtcctttgcagcaacatggatgcaactggaggccattatcctaagtgaatcaatgcaggagcagaaaaccaaataccgcatgtactcacttaaaagtgggagctaaacattaggtactgaaggacataaagatggccacaatagacactggacactactagaagtgggagggggagagaagggggcaagggttgaaaaattagctgttgggtactgatatggtttggctgtgtcttcaccctaatctcatcttaaattgtagttctcataatccccacatgtcatgggagggacccagtgggaggtagttgaatcatggagggcagtgacccccatgctgctgttcctatgatagtgagtgagttctcatgagatttgatgtttttataggggcttttccccccttttgcttggaacttctctttgctgctgccatttgaagaaggatgtgtttgcttccccttctgccataattgtaagattcctgaggcctcccaagccctgtggaactgagtcagtaaacctctttcccttacataataaatcacccagtttagggtatgtctttattagcagcgtgagagtggactaatacaggcatcatgctcactacctgggtcacaggatcatttgtaccccaaaccttagcatcacagaatatacccaggtaacaaacctccatatgtaccctctgaatctaaaataaaagtggaaaaaattattaaagttttcttaaaataaaaaaactgaatttgctgatagaaaataaaatatttctgaatcaataatgacaaacaaaccagttgaagaaatggggcaaaggacttaaagagatacttaacaaaggaagatatagaaatggccaatatgcactcaaaaagggaccaacattattagtcatcagagaaatgcaaattaaaaccacaatgaaataccatatcacacacactagaatgtctaaaatgaaaaaaatgacgatattaaatgttggtgatgacatggagcaactggagctctcaaatactgccaagaggaggataaaatggtacaacctcttggaaaagcagtttggtagtttattattaaattaacatttacctacctctgctccaggaattttactcctaactacttatgatccaagagaaatgaaagtatatgtccacaaaaagatttgtatgtaaatgtttatagcagctttatttataatttttccgaactgaaaataaccccaaatttcaacaagaagtgaataaactatagtatattcatttagagaaatactaacaataaaaaatatttcatcaactattaatgcgatctgcaacatgcatgaatctcaaaaacatcattctgagaaaaatcagccaggcacaaaaaagtactcatggcatgattccattttatgaaatgcaagaacaggtaaaactaatctatggtgataaaattcagaatagtggttgcttaggaggtgtggggatggcctagaatggatatttgggaattttctgggttaacatctgggatattctacatttttattggggttgtggttacagggtgtatgtagatatcagaaatcatgacttaaggcctgtgtgtttcactttatgtcaattttacttgaattaaaaaattctagttacattagactatgatagcgctttgccttactaaaattttgattgagactgtaaaatttacaacagtgttctccacatttagatatagtacttattcattttttctctttgttttgtacttgggaaggaaattaaaaaaaatagcacacattttttttcattcattgctcatatttcttcactgtttcctgttttaggtaaagagtaaacgaaaattacctcccaagaaatatactaaaatgttgagtcttataagtcaaactaatctctttatttcatgtgttagaatgctgagcaacttttgaacagtaagatcccaaatttccggtttgaattacaacataatagaattttgcattcaatttctgtgcttaaatggatgctggaataagttaaattgtgtaatgcttttaaaatactttaaagtttttgaaaaatgtttcttgaaaaatttaagatatttaatcataatatttgtattttttatttaaaatggagaatttttgttataaatagatgtaacatcttcaaaacacctttcagaatttttggactataatatacaattcacaggaaaacagtctgagggataaaatgcttgctcactgcacaaatgtcttttaatcaaaacttttttactaagtatctttattactgttatacaggaaccttgctattataatttttcttaaggagtgacaccaaatattgaatttgttgtcatagtgacaagcaattttgtattaggatgaggtttaattgctttcttataatctgtgatttgttatctagaaaatcatttttaaatgggctacatttgtgtttgccagagcaggtaggaatagagtgctgcagtatttgaagtggaaatgctctccaagtgggagtagagacagggaggaaaaaataatgtgaattaataaatgaaggaggctggatagaggcgagagagtaggtgtaaagatgcagggccttgagggctgagacaagatgtacagactgtgcattctggtaggcactcaagcactttctgaattgaattattaagacttaggaagccagaggaagaacttaaggagtgtggtgaggtagtcatggtgataaaaagggaagattttagaagatgcaatttgaattaactggaagaagagatctgaagcagtgagtcttgtaaagagaaatttgaatttatcaaaatgacagaaaccaaaaacattaaggagtttaggcatatgtcataatgacagggcaatgtactcactacacagcctaatggctcattctaatagactagtgggttcaaataatttatgtagtttgtgtctatgaagtgtggagaggaacactgagaatatcacattgcaggcaatcgtttatttacttatctttttatctcatggtactggtatttattactttcaccttcatatagcctcaatattttgagcccagaaaggtgcattttagtcattcaaaaaatgttagtagacattatgaagtcagccaacaaatcattaccgtatatgtaataccatgtactgggcactattctagacaccaggaatgtaatggagaacaacacagaagtagtcacgtttctcaagaagtatatattttactgctgagagagtggaggagacaatttttgtaatttattcattcacttattcattcattcacatactgatacatgctatgatgcatttaaaaatgggataatatacaagaaagtgacaagactgggccagtaattttagttagaactgtcaaggaagacctctgggaggaaaccacatttcagttaagacttgaatggtgagaaggcagccatatgaaaatctggggaaagagtatttgaaaatgaaatcatatgaaatgcaaatgaacctaggtggagatgagttttgcatgttcaagagagagaaagaagggcagtgtgagagaagtagagtgaacagtagaggaccgaggggcatgagacctgaggggcagttgaaacaccatcaaggcagagcctgtgataaaggctttaggttttattccagttgcagcaggaaaccagggaggcagggaagtgatatgctctgatttatggtttagaattgtcatttggttgctgtgtggacattaagactgagatagaaagcaactaggagcctcttgcaagaattcaggtgaaagatgataaaggttggaatcaagatgtcacagtaaagatggtgagaagatggtgtgtatctttgtggtagagtggacatgacctgctgaagaatcctatgtggagtatgggggaagacaggaaccaaggatcacatgtaaattttctgcttcagcaacttggtagataatgtggctatttaaagagatgacaaaaggtaggtgatgggagaaatttgtgtctctctgtgtgtgtatgtatgtacacacatgtccattatagtttcacataggctgtgttattgatccaatgcataactttcagtaaacatttcctgagcacatcctgtgttccagccactggcctaggtgttaggaaaacactaaaaagaaaatagagagacttgcttccaaataatttacattgtaatagagcgagccaagtaatgaataagtagatatgctttactttgttagatgttaacaatgtctatggataaatataaaaacagaagaggaagggagagtgctgaaggtagagataggttttgctaatttttttttaagtgagatcatggaaggccactttaataaggtgttgtttgaccagaagtttgatgaaagtggggtaccagtcatgtgagcttctaggagaaagagttccagtcagagtgaaaagcaagtgcaaaaatcatgaaacgggtgtgtgtttgacttattggaggaactgcaaagaggtcaacataaatgaactggggataaggagaatggcagcagatgaggccaggagaggcagggaacagatcatttaagatgttatagaccattgtgaacaatttgccttttactcagggtgagaagccaatggaggatttggggcagagggatttggtcctgtaggtctcaaagcaagtagtatttctagacctccaagtggctgatcttgtacttgagggggcagagtagcttacaggagtacacagagcatgaaagccttggcacagctggagttactgcttaggaggacaaggataaatagaaataattacatttacgtggcttttgattctgacgctttgttagaaactttattttggctatttacaaacctgaaggaaggcaattttatttttccataatcaaatggaaatatttgtgggaaatctatgctaaaataataacttctgtgaacttttctgttcaggacagtatttattttgtagccattaattcattttcaaatgattgcatgtcatttacatttgaataacacacctgttaattagtttcatctaatcagtcagcatagaagcttgtgctggagaccaaaatgattcatacagcttggctcctgaaataaatctggactccaatttaaaagaaaatacataaatacatatctataccaccaatacacatccataccaccaaaagaaaatacataaatacatatctatatataataaaatgtaattttgcagaaaatattatataatattatataacactacttgatgtgttattatatttttaatatcttatactgcctaggtctggttgtttagatggttatatagatgtagatttagtaataaattcaaagcttaagaggattaactgaatttcagagttgcaaacataataaagcttctcaaaattctggttcatttatgattcactgagatattattgatgcatacttctcaatcaagtatcaaataagtttcttctgttatttatttatttttacatgatttgaatggatatttttatgatgtgtaccaattgctactctaattgacttgtagtggtagagaaagtaggaaatatctatttggcttagaggatgctgacatcccagcctgtttgtacaaatggaaccaaattataacactcaaatattattgccagttagtactctgttttgcatgcattaacccttcaaacctcacagcaatactgtgaggtagagactattaatacagatgaggaaaaggaagtactgattgttgaataactgtctgtatgccgaggtcatacagctattaagtagtaggcaagtatttgaaaccaaggccttttgactccagaaaaaccaaatcttactgtgattggcttatttcacatatcttgggagctcacaggagtttaacctggtgaaactgaactccagcctccatttaccagatattcctcctctcttcctctgttgtttcttacacctagtgagcacctcagggaaatttcacaaagttcgtcacatgttcttttgaatttatctgccaaacaagtttaccacatttctgccagttcttcctttttgattccacctttcccatacccatatctctgtttatgaggcaactatattgttagatgcgaaaatgctgatgtctgtgttaaaggtatttttccttgctgcttggaaaagtcgttaatcctcaaggtcagagcaggcctaggattcatgcagaagcggtaatgaaccccaactcaacaatgggtggcatgctgtcactttgacattgaaatagcactgcttgtgggcaggacttcagaaaaaaacttattaaaagtagattctccagcttctacacttaatgtggctctcgatttgtgcttcaaatatcctgaggggttaaatgggaccctaagcattttcctatcctttacatctctttctcttctcttactgcccgaaacaaagcaaaatgaaaaaccctttcctttctctttcaccaaagccattgcacttcaagttatataaatggttactcaaacagattccataacttggcaggccactttggggtttaatagtgaatccatatcataatactttttttttttttttgagatggagacttgctctgtcaccccagctggagtgcagtggcatgatcatggctcactgcaacctccgcctcccaggtttaagcgattttcctgcctcagcctcctgagtagctgggattgcaggtgcctgccaccatgccaggctaaattttgtatttttagtagagatggggttttgccatgttgatcaggctggtctcaaactcctgacctcaagtgatacacctgcctcccaaagtgctgggattacaagcataagccactgtgtccggcccatatcataatactttttaaggctgttgggcaaaggaatgcttctgaacaggctcaggatccccatataaattccagggtcattgggaggccgaggcaggtacgtcacgaggtcaagagatcgagaccatcctggccaacatggtgaaaccctgtctctaccaaaaatacaaaaattagctgggtgtcgtagcacacacctgtaatcccagctacttggaggctgaggcaggtgaattgcttgaacccgggaggcggaggttgcagtgagctgagatggctccactgcactccacctgggtgacagagtgagaccccaccacaaaaaaaaaaaaaaaaaaaaaagtccagggccatcaaaaacctagagaaggggacataatttagcagaaagaaacatattaatgaattctgtttaaatcatgaagagatgggtgcaaggttagtcttaggcacaaatgtgaatttgacaatgtttgtcttcagggttgcccgtcttttctttctcaaccattcagtttcctccctggcatagtcctttatcagaatcaggaaaaaacaaaaacaaatctcactgtaaattaagtttaataactttgtgcattttaaacttatttctaattagaagatgacaggcttcattattatcaaaggagcttcagacttcattgtgggggactagaaagggagaagacttaagaagtcttttctggcagccttacaaattgcaactcacaacctaccagctattcagcctataaggctgattcagttagtggggctatttaaagatttgtctaatgcatgctgagaagttaaacagaagtatcatgtctcttcttgttcttgggtggtgtgaaattcatttgccttggaaggtttttttaactctgtgaatgtttgcactttgaaagaccatattcttaatttggaatggcaactgtgccagatatcttggcaactttacaaaaaataactttaatgttaaaggaaaattatacacaatgaaggctgtcatagtatgttgcattgataggggaaagaatggaattaatataacattttcttgttaacttcaaatttcaaaattaaaacacattttaatacaagcaagaaataaaataataaaattctggaacatataacttttctgctctttatattcgcagtaactagaaacaagaaaatattttctatttaagcaacaactataaccaataatggtgataatttgttattgtgaattcatatgagagaaattagcaatgagagatttttgcagctaaagagaattttaatgcctctctatttagctgaatggacctttggaaatgattccttagttggaatgtgtttgggttacaatgatgttatcaataataatatagtctaccactattttttcagcacatattgtgtgccaaatatcaatgcatattttcagtgtctatcaaaaaacctcacaggtaaagataggtcttgttcttcctaatttgcagaagaaacagaggctcagagagttttgtcaacttactcaggcaccagtaaagtggtcaaattgaaattcaaaccctcatcaagccagacttaaaggctttgttctttcaactatatcctgcttatgtctccaaaacaaaaattaatccctatttgtcatgccagtatataagtggcagtggctataagggagggacagttagtttggaccagggaaagtaaagcaaggtcttgttggagggagggcaatgaggaaacaccaagggttaaaggcgattccagctagattagaccaggaaaaatagtatttatcatcatacttctaggagaaacaggagcaccaatggtgggtcatggctggtggttgaaccaagtagactcattagtagcaggaaaatatattgcaaaagatttgaaaaatagctaaagaaaaggtattccagttgaggatcttaaagaaacatcatgcttacatttggcaatttcaggaatatctaataaaagaactaatttaaacatgtggacaggatatagagaagtaacaagggacaatgtgatctcctgaggaaagtaacaacaagaagctgttaccaccactcatacacctgacatggtgacagacagtgactcctgaaacctggagatgatagttagtgtggagagggtcatatcacaaaagctgtgacctttgcagcccctgattcaccacacaggtagggagctggaggagtaaatacttcatctcctgtcctactgtccatccaataacttattgtggcctttgttggtacgacaggaagctggagggcaaggtagtctgttgataagttccatgctgcccagcctcctggacacagagtagactggagaaaagttggagaggagatctggaggtgcaagtggaagttagccagcacaagatgttaggcagagaatcaagaaacttgcttcggaatcaagcatagggcagagctggggcaactgaatagctggattaggatcaaatgagacttgagagctgaagctctagcttccttttttcactgtattggttagaatcattcattcattcactcattaattaattaattgcttaatttattcaacaaaacattcttcagttctactatatgtcaagcatatggttatcgtactaggttcagtacacactaggagcctagtcatgaggcgtgttaaaaaggcaaccagaaacctcctgacatgcttattaattacttatgtattattctattatctgccattactttgccctaaactctgaaggtgggggccagggggtctttttaggttcttagtctgctttatgcggctacaacagggtactggaaactgggtattttataaagaacagcgatttattttttatagtactggagcctgggaaatccgaggtcgagggacccatatctggtgagagcttactttttgtgtcatcctgtggctgaaggcaaaagggcaaaagattgtatgtgcatgagagaggggagggggaggaaacccactcctgtgatagctaacccactcccgctatagtgacctaatcacctcttaaaagtcccacctctcaaaagtcccacttctcaacactgttgcattgaaaattaagtttccaacacaggaactttggaggacacattcatagcaattcataacaaatcatagcgcaacaaatcatagcagttatattaaataattagactcacaagattatcataaattacacatggcatcaaatttgcttagaagcatatgggacaagaaccttagttgcccagcagggcaatgtcagttattactcttctgtggaactagccctcacggcagtgcatggtgaagtctttgctgcagcacaagagctatactctttgctttctctttgctatgaaagaatgattctcagagcagctgtgaaaattcccctggtttaaaaaccacatgtcccacaggagccagtatcttttgtaacaactccataggcagggcttctgtggtctctgaaaaaggcatgtccagtcacaaaagtctaaagctatagtatccctatcaggtatttatcatttatttataatttttctcactccacatacaattagccaatcagtttatttttaccccaagcaatcctgcctattagcatatttgacatacttcctttatcaggttgtcaagggaatagatctagaaagtgaattaaagatcagattctaagggagaaagggaaaatattttgttaaccctttacccacacacattatgcttctaattagggatttgttggatcaaacagaactagagaaaagtttaaaaaggcacgtgacagttaaagttcctaacttgggtagggtttggcatatctacagacaaatttagctcctgttacaaaaaagaaaacccatattccactttgcaccagcaaatgattttaaattgtcaaagtgattcaacagtatcatccaaagaggtggtcaacaattacgtgatgaattattattgaaactattattattgtgaaggacaagttgctggatctacttctgtattaaggtaggccttggaatgagctgatatcttaatatttagtttgcaaagcgctaaaacattacaaagatgctgtattttctgtgtcatgaaaaatggattagcatagccattgaaatatgtgtcaaacatctcaaaggttaattgcttctcctttgtcctcttataggacactaaacttttcttattatgttgtattgtacttttttagtaaaaaattatccccactggacagtaaaccctctgaggacaataatgatgtttatctcttcattgcatccacagcatataatgcaatgccttgcatagtaaatacttagtaaagttagttgaataaatgaatgaataaatgaaagaatgtaactataattcatattatagtggactgaaattttggataaaatatttcttataggactaactgtctttgttcaatggtattaaaatctgacttccctataattttattttctatagaaagccagtcacgtgttttcttttaagaaagatatatgaagagtgacccattgattgttagagaatgcagacagctttgatttgtagtacatttttctacagggagctactatggaaattatttgccagggtgcctaagaactctcccttgaacttcaatggacttttaatattatctttaaggtcctcgtagaacagttcttaagactcatagatgaaattcaattcacagaatccactgcaagaaaagagattctcaaatttatttagagagtgatgcagtacaaatcctaaagaaagaaaccactgttggaagtttagcaatttattagactaataattccacatgttacatttgatagtgatttaaaatttacaaaatattttatgtgctattttaattaaaaccctattttagagatgaaactcgtattttacaaatggaaagcctcaaaacagaatgacattgaacacagaagctctagaatcaaacagcctgggtccaaaatgagactgagtgatcttgggtaaaatactttatttttaggctactcagtgtcttcatctggaaactggggaaaatgatagtgcttgttgtatagggttattgtgagaattgtaaaatgcaaaactcttagaagagtgaatggctattattaacttacttgaagccaaacagttaatgagtagtaaaagagaaatttgaatccaggttgtcggttttcaactttagtattattttcaccaaactccattgtatatgtaatatttatttgacttttatttagaatgatgcagattttgcccatgtatcacttcctctgacatttggagataacatagtttaattataaatgtatggtttatctctgaactgtgatcatcttggttaaatttattggataatggcagatagctgatggttttcatttgtagatgcaaatggcttggatggtaatgttgtaaaattatatctttatatatttattacagaaaattcagtgtaccaagtcactaatcacctaatgattattcaaaattatagaaaaagcatcactaagatatgaaagcaaggctttctttgatctatcataaatacctcagtttcccactattggaaatataaatctcttaatgtggtttgaatgcttcctggctgcataaagcacagattcattttcacattcacagtaccatttttacctctatacagagctgtttggtaaaatatcttatttaacttagaaatagtactttacagaagacatataaatataaatctaggttacaatcatgtgagtgaaaggctatggtaggttggaagagagtttgaatattttgtgtttgtgttgtctgtgggacctccaaatgtagatgtttaagaagacattagatatatggatttgggatttaagagaaagatttggaatggaaatatagatatttcagaagctaacatgaaggagatagtttcaatcatgacagtggctgagatgtctcagggagaaatatgaagaaagagcctatgtaaggaaacttggggaacattagaagttaagggatatgtagcaggagttgcaaaggagactgagaaagaaaaactcaagagtcaggagaaaagcccagagagactgttgccctggaaaccaagagatccattcttctgacaaacattttttgttattactttatataaaatgataaaaatcagtgaaaacagcaaattagcttatatgctaccgaaatgagacagaaataaataagtaaattatacattttgttagaagatgttaagtacaataaaaatataataaagcaatgtaagagagactgggagtgcaggagtcagtgctgcaattttaagtaacagtctggttaggtaagtctcaccaagaagctggcattttagcaaagacttgaatgaggttaaaggagagagatataaataatatcaaaaaggatgcagtagtctatatttttcagaagggttaggtaagatatgaattgaaagtttccatttgggttttttgaagttcggagtcaacactgagacaaaagcaaagatttggtggctggagtgggataaagggcagattgcattggatagaggcataaatttatggtgaggaagaaaagacagcaagcatgcactattctttctaccagtgtaattgtgaaaggaaaaggaaaaaacaatgtggtatccagaggggacatggattcctaaagattttgaacataattatagatacagtgggggtaaaccaacatagaaggggtttaaaacccaggagttgacaggaggatgttaatttataggaggaggcacctgagaacaaggaaaatggggaagagagaatagtacataaatggagaacgagctcctccacttggaaaaaaatgagtaaggaaaggttgagttagttatacacaatctagtgatggggagaggcaaatgatgactttcgtctatgaagtaaggagttaaggtgatttgctaaaaatgataaggtaggtaatgacaatagagatcctgcaatgatttcatgtggactctgtgggacaaagaataaggagatgaccaggactgcagaccaattttcagagtttacttgaagccggaatccttttttcatgaatttttcatatcattcatcttcacgattgagcattgtgacttttctctagtaggtcctatcagtctaggcatagaagaagaatgaatatacagctgaactgatccaggtctgaagttttgccttgtgtgtgtgatgaatcgatcaggagaatgtgttaagggagtctgcaagagtatattcagaatgacacttagattagttgtagaaaagagaataaataggaatggactgatgaattgggaacaaatggagagattaaagggaaaagggcatggaatgtgtgtgaggaactgatataagaggatgtggttcaacaaatttgaacttggagtttaagagttaaaaaatggaattgttctaggtaatagaaagctaaaatgtggatgcctgaagtcaagcggaggtgggtaataaatagaactgaggacaaagagtgtgaggcaagattatcaaactggtcaaccacgtgaggactaatttcatggagcatgaaggcagtgatgaagagggagactgtgaaccaggtatgaagttattgttgaatcagtggaagataaaaaatagaagaaaaaagggaggcgataaatggatcacgtgagtcccaaaggaagatttagcaacatttaagacattctgctagactcaagaagactgcctagggaattcactgtgagtggatatggtacatggattcagtattcatcctttttattagcaaattaagctacagtgtatcatatttaccaatttaccgtaacccaacctaacctaagctggtaccttaattaaatggacttttgcttctttcaactattctgtttggatgagagcaaaatacaataaaataagttaatattaggggattaataaaaatgccaacttgttggtcatttatggttggagatatattcatgctagtgtcctatatcttctctattttcttctttaagatgacacaataagaaatgatatttgaaggaaagacagaggaattgagatagcatggccagctatctgttgtaaaagacctaatgcaaccattaaaaatggagtataggccgaggcgggcggatcatgaggttaagatcgagaccatcctggctaacacagtgaaaccccgtctccactaaaaatacaaaaaattagacgggcgcaatggcgggcgcaatggcgggcgcctgtagtcccagctactcgggaggctgaagcaggagaatggcgtgaacccgggaggcggagcttgcagtgagccgagatcgcgccactgtactccagcctgggcgacagagagagactctgtctcaaaaaaaaaaaaaaaaaaaaaaaagaaagaaagaaaagaaaaaaatggagtataatacataaagttcagatatttggaaagaagtgtgttgagtttcaaatcactgacaaaaactaaaaataagaagaagtatgatttttagtttacctataatgtggctatttgctcagaaaaaaatctaggtacttactaaataaatatttgctctttttgagatatatatcttattcccatgaagatctgaaaattttttttctctaattttaatggaactctcaggtctcagaataagcaaaacagaaagagaatgttggtaattttggtcaattttaaaacaggataattgaaggagtggaaacttttataaaacaactttatagctataattttctcattgtagctataactctgtaggttttgactgtgggcaattaaaatgagtaggccaattttaaggatatatttccactattctctggagaggatgagcaagctactgacacattcatcatgcactgggatgaaagcactagttcggccaagtatgagattggttgattgtagagacaaaagctacagacaatgttataatgtacaaaatacaataaaaattacttgtgggagaagatggagaaatatctcgattctggtgtgcttgctataaatgaggttcctaaatgtagaaacttgtctggtgcctgtaattgcttcattcagtaatactgtacctgtctgacacctgctcgccttcctttccatttgttttctctattctttttttcccttcttccattttttaattgaataattatattttaggtactaagcacacaccagggacaatttgatgctgtgaataaataggtaaaacatattctccattcttaaggaacctacattctattggggtgaaaattaagacaaacagatatctaagatgagacaaataacattactaaatagcaaggtagtgctggattatttcagaggccaattttagtttatgtttagggtcttggcaaagcagagggaaccctcccaccccatcccccagaaaaataaaatttgcttttgataaacttttctagaatttagcaattgaaaaaaagttaaacagaaccttgattttttaaaaaaacgttcaatatagataccacatttaacattcaaaataagattgtactttgagttagatatatggtgtggtctccaaagttcccagcctagcactgcttacgggcagactgaacagcagatacactatcaggacagcatatatgccttcagagaggaatgcagctcttcctctcgagatgtcttcctctgactcagtgtcctgtcttaaaatgtcatggtgcattgatgaagaagagtgagagtcagagagagagatgtcacccacagaaaaacttcatatcaaattccgttcatgctctttattcattgacacagggatatacatttctgaaaactctatagagcacaataaaaaagagcaggtgagtttattttagaacccaccgtgaactgctgttgataaactggatgagtagcaaaatcccaggcaaaactcagctaggagggcttctccattttactactctctacccaccataccctcgatcctaccacatctccaatttagtctcttcttttttttctttttttcttttattaaatcagaatatctttatcattatttttctttggaaaatagaatcccaaggatatgttactctgattcagcagattagttaccttggtgatgtcacttttatgttacatcttcataaaggaactgcatttggatgttagcttatcttctgttgaaaaataagtgtgatcagagcaagcgttttggtatttccgagaatacttacaaaaaccccaatttttataagcctttaaaaaaagatgttctaagtcctgagtgacctacaaagagacttagactcccacacattaataatgggagactttaacaccccactgtcaacattagacagatcaacgagacagaaagtcaacaaggatacccaggaattgaactcagctctgcaccaagcggacctaatagacatctacagaactctccaccccaaatcaacagaatatacatttttttcagcaccacaccacacctattccaaaattgaccacatagttggaagtaaagctctcctcagcaaatgtaaaataacagaaattataacaaactatctcacagaccacagtgcaatcaaactagaactcaggattaagaatctcactcaaagccgctcaactacatggaaactgaacaacctgctcctgaatgactactgggtacataacgaaatgaaggcagaaataaagatgttctttgaaaccaacgagaacaaagacacaacataccagaatctctgggacgcattcaaagcagtgtgtagagggaaatttatagcactaaatgcccacaagagaaagcaggaaagatccaaaattgacaccctaacatcacaattaaaagaactagaaaagcaagagcaaacacattcaaaagctagcagaaggcaagaaataactaaaatcagagcagaactgaaggaaatagagacacaaaaaacccttcaaaaaatcaatgaatccaggagctggttttttgaaagcatcaacaaaattgatagaccgctagcaagactaataaagaaaaaaagagagaagaatcaaatagacacaataaaaaatgataaaggggatatcaccaccgatcccacagaaatacaaactaccatcagagaatactacaaacacctctacgcaaataaactagaaaatctagaagaaatggataaattcctcgacacatacactctcccaagactaaaccaggaagaagttgaatctctgaatagaccaataacaggagctgaaattgtggcaataatcaatagtttaccaaccaaaaagagtccaggaccagatggtttcacagccgaattctaccagaggtacaaggaggaactggtaccattccttctgaaactattccaatcaatagaaaaagagggaatcctccctaactcattttatgaggccagcatcattctgataccaaagccgggcagagacacaaccaaaaaagagaattttagaccaatatccttgatgaacattgatgcaaaaatcctcaataaaatactggcaaaccgaatccagcagcacatcaaaaagcttatccaccatgatcaagtgggcttcatccctgggatgcaaggctggttcaatatacgcaaatcaataaatgtaatccagcatataaacagagccaaagacaaaaaccacatgattatgtcagtagatgcagaaaaagcctttgacaaaattcaacaacgcttcatgctaaaaactctcaataaattaggtattgatgggacgtatttcaaaataataagagctatctatgacaaacccacagccaatatcatactgaatgggcaaaaactggaagcattccctttgaaaactggcacaagacagggatgccctctctcaccactcctattcaacatagtgttggaagttctggccagggcaatcaggcaggagaaggaaataaagggtattcaattaggaaaagaggaagtcaaattgtccctgtttgcagacgacatgattgtttatctagaaaaccccatggtctcagcccaaaatctccttaagctgataagcaacttcagcaaagtctcaggatacaaaatcaatgtacaaaaatcacaagcattcctatacaccaacaacagacaaacagagagccaaatcatgagtgaactcccattcacaattgcttcaaagagaataaaatacctaggaatccaacttacaagggatgtgaaggacctcttcaaggagaactacaaaccactgctcaaggaaataaaagaggacacaaacaaatggaagaacattccatgctcatgggtaggaagaatcaatatcgtgaaaatggccatactgcccaaggtaatttacagattcaatgccatccccatcaagctaccaatgactttcttcacagaattggaaaaaactactttaaagttcatatggaaccaaaaaagagcccgcatcgccaagtcaatcctaagccaaaagaacaaagctggaggcatcaccctacctgacttcaaactatactacaaggctacagtaaccaaaacagcatggtactggtaccaaaacagagatatagatcaatggaacagaacagagccctcggaaataacgccgcatacctacaactatctgatctttgacaaacctgagaaaaacaagcaatggggaaaggattccctatttaataaatggtgctgggaaaactggctagccatatgtagaaagctgaaactggatcccttccttacaccttatacaaaaatcaattcaagatggattaaagatttaaacgttagacctaaaaccataaaaaccctagaagaaaaccaaggcattaccattcaggacataggcgtgggcaaggacttcatgtccaaaacaccaaaagcaatggcaaccaaagccaaaattgacaaatgggatctaattaaactaaagaacttctgcacagcaaaagaaactaccatcagagtgaacaggcaacctacaacatgggagaaaattttcgcaacctactcatctgacaaagggctaatatccagaagctacaatgaactcaaacaaatttacaagaaaaaaacaaccccatcaaaaagtgggtgaaggacatgaacagacacttctcaaaagaagacttttatgcagccaaaaaacacatgaaaaaatgctcatcatcactggccatcagagaaatgcaaatcaaaaccactatgagatatcatctcacaccagttagaatggcaatcattaaaaagtcaggaaacgacaggtgctggagaggatgtggagaaataggaacacttttacactgttggtgggactgtcaactagttcaaccattgtggaagtcagtgtggcgattcctcagggatctagaactagaaataccatttgacccagccatcccattactgggtatatacccaaatgactataaatcatgctgctataaagacacatgcacatgtatgtttattgcggcattattcacaatagcaaagacttggaaccaacccaaatgtccaacaatgatagactggattaagaaaatgtggcacatatacaccatggaatactatgcagccataaaaaatgatgagttcatgtcctttgtagggacatggatgaaattggaaaccatcattctcagtaaactatcgcaagaacaaaaaaccaaacaccgcatattctcactcataggtggggattgaacaatgagatcacatggacacaggaaggggaatatcacactctggggactgtggtggggagggaggaggggggagggatagcattggtagatatacctaatgctagatgacgagttagtgggtgcagcgcaccagcatggcacatgtatacatatgtaactaacctgcacaatgtgcacatgtaccctaaaatttaaagtataattaaaaaaataaataaaataaaataaaataaaataaaataaaaacgatgttctatttaacattgagaatggagattgcaatcctgcctcagtgattttaagaatcagcatcagttttaggcttctaatgtgggaacaaatatcttttgtgatggacaattccttcacttctctgagttgctccctgaagttttattttagtgagaaaattattggctagttggttcaaagcaacactttaactgcatgattgagcttacttcatcccagctatgatttcaactgttacaacattggctgcagaggaaaaataatagttttctcctagagtcaatctgtcatgtcccctggctgtgttgtagctcatgaccactggtgaaattaatcagtctggctctttgagaacgtgtttccttgacagtagtacattgttaaggaagcattgtccatgacttctttacaacatgactagattttcagaaactatgtggtttacttttttttactttctttgccattttcttgattccataataaataagtttaaagagagtcagggaatgctagatgactcctctatgaaattgagatgtaatttaattaaattttcagagataagttgattcctcacttcaaagttggatagatgttgcctccttctaaaattttttcactctaaaattctctaggctttcagtaaatattaacagcaaaagcatagttcagcgggaataagagttatttttatgagatgcttaatttgaggatgtagaattgccttctgttaatgttgtttaaaatagaatagagtaagtctgtctgggatgttttaagacctctgaatgagtacttaagatgaccacaaatacagtataaggactactttaaaaccagccacttgcctctgtgattactggagagaaatgttcatttcaaaaccctttcttgcccaagacaaacagatttatttaatcaatgatcatagctccttggatgtcataaacttcctgaaaagtttgtaaagatcggcattcctatgagtctagctggactattcactatgacaagaccttaaaatgttttttagtccatcatcctcttttagacaaaggcaaagtatgagacatagtcatcagatattatttctagatactctatttttgggcacttgtgtccatccttacttcatatgatttcccccctttttagacatgaggctttttgtagttcagtgacttagcatttttatttcccattctcaggatggttctgtcaaatgcagactccatagtcagaaatgtggtttgttttggtatcattgtataattatgaagtttctttggtttgctctcataggtataagcatcttgactgcagttgtcattagggggcccacctggcctagaagtatattttcaaaatatttgaaaagagtatttaatatgggatttgatacaataaaaatgtattcaccttttgttggcagtggtcaaacccactatctggaccaaaaaactatatcccatgtactgatcattactgtagattgtatgtgcagatagacctggttctgactgaccccaaatcacttccaaaccgtattttctcctgccttcttacattatagaggctggaaagattttttaaagttctctttccagcttcctttgacaaaaggggtgacatagttctacccaagtggaagtctgctggcatagcatctgagaaaatgtctctttccaaattaacagggacaatttggtgggcacaggtccacccctacttgttttagcagctaatggggatgtgatgcttagaattacagcaaccgccttgtgatgatgaaggaatctgcacaggagaatcatagacactggccttacataactgagccactaaaccaatgctagcagccacccacctccagatgtcttttgaagcaataaaaataagctcctatttattttagccactgttaggtttcattatatgcatctgaaagcatatggtgtgtgtgtgtgtgtgtatgcatgtatgtataataaaattctggctttagccgttagtttctcctcacaagggaactgacagaagccagaggttgatatggccaagggaatttacttgggcctatttagatttcttctcctttattattttggtttgctgatttagattagttctatattttcctgtgctaaattatacttttaaaaagtatttcagagccttctaagtctttctgaatttgttcagaacttagatttccaatagtgcctttattgatagcacatctttattctcaccattataatactcagatttatggtttgttctcctttgaaatatttaataagattgcagttcagcagctctttattacagaaataatgatattactgctctttggtgttttcagtctgtttctctttgcctcagtctacaggagtaaatctttctggttaaccctgcattgtgttagaaggagatcgtatatcccgattctcagtttaggtgggcaagaagagttgttctgtggagtctgacttgagaaagattcttctttgatgaagcatgagctctataaaacttccttgtggtatcataaaaaaccttttctggctgtagccatttgagatttaactatttcatcatttaatgtctactaacttctaggctgccttctcataaaattcccagtgcctataatatgcatatggtaggtgcctagtaaaggtatattgtttaaatgttgaatgatgaattgagattttaaaaaaactaattactgagttatcttgataagttttcttgactgttggttagaatacagtttgtatctcacacgagattgtgagctggctttacaaaagatgttaacaaacgaatttaacattttaatttaaacaaccagcaattttcaaataatctctctaaactgattgtgaaacacaagctttaaaaattagaaaaaaaccaatgacacactgagaaattatatggctgtcaaaaagtaaccacagggtttcacaaaaatcaggatctcataaacaccatatggcgattgagtacttctttgcgctttttgcttctggcctgagacagagaaatgcaaaaaccaaagaaacacagctttgactctttatttagctctgttaaccctacagagatcatgttggctgaggggaagaaaagtgtccagctacttgatatatgacaacaaaaaattagaaggacctttgagattggccaagcctgacatcctgaaaattgtctcttttaaattttttgaaggatgttatcacttggaactttttgccattaacctacattcccaacacttccatagttcgatgctgctgaccatgtttttcccagtccctagaatgccttttctctattataaatctcctagtcatctttcaagacccaaataaaatgtcacctctactgtgaagcactcatcaagtcctccaaaccatcttagaaattccattttctgtattgtcagatcacctacacaacacacacacacacacaactacacacacagtgtttatctattatagcaccatcacctattatggtaatttgttgatttatgtgtctttctcccttctagaccttaattctatgagagtaggggctgtgactcatttatctgactaaatcatggcctaacgatgcctcagacagagtaagtgctcaataaatctttgtccaattaatgaatctcctggagaggaaaaaactcagcagtaaagattcaatgggagttaacaaaaatgtatattaacaggacctgggatcagggcagggagaaaacatgagttagattaaacaatgattgttaactatttaggatttgtaaatatggtgctcaattataccagtatttctcaggatgcttttgagtagaagaaagtgataccctgattcaagctggcttaaacaatgagagaacatagaggaaaatacagagacagagacagagcaggctgagggtatagtacaatagaggcttcgctttctcatcttaatgattattttggttcttccctcttccttctttactttaagctggcttccttcatggttggcagttggttgacggttggcagaattggcaattaacatgcatccttattctctctggctgaagctgagtaaacctaccctcccaccaaggagtaaagattcttacctttagtctgattggtccaacttaggttgcacactaccctggagcatcacgggatgttgaggaataccatttagtacttggtaggttggttgggatgatatgattggctactaatcaagagaccctcctgaagttgtagggaattaacttcctatgccagactggctgtgtgtgggaggagtagcgtggtgaccagcagactctagtgtcccactgcctgcattccagtcccacctcttctgttcacctgctctgtgagttcaggcaagctgactctcggtttcttcatctgtagtggaggtggtaacaggacctacctcatgatattactctgaggtttaagtgagttattagatgtaaactactaagaacacatggtaagcaccatggaagtgtttgttagttttcccttcttaatgatttaaccaaaattggcgttgtgttaaaagggcaacagcagggaatacattcaatttaagcaacaaaaatgttcattatataagtttttgttttatttaacaacttgatgttgttgttgttgttgctgttgttgttgagatggagtcttgctctgctgcccaggctggagtgcagtggcgcaatcttggctcactgcaagctccgcctcatgggttcacaccattctcctccctcagcctcccgagtagctgggaccacaggtacccaccaccatgcctggctaattttttgtgtttttagtggagacaggatttcaccttgttagccaggatagtctcgatctcctgacctcgtgatctgtccacctcggcctcccaaagtgctgggattacaggcgtgagccaccgcgcctggcccaacaacttgacttttaaggttatttaatttatttttgaatgtttatttctttgtaatgatgagtttcaatttttaaatgaaaggataaatggaaggataatagcatagaaaaacatgtgattaactgtctattaatcatgtctggaaagtaagaaacattatttgcctatttattctaagagtgtttattatgccaacctgatggccatataaaccaattacagataaagtatttaaaaataattttgagtaatatattttggggtttaattagatttttaaacatcatctactttaccctttcattttgcatatcagaaaactggaccagaaggaattaagtaaactttccccaaattgtacagttggtggcagaactggttttagaggcattttaaacttcaatcaaatatttttttactggcccatgtaacattcctcttgagtggtagacccacaaggcctaaataactaaagatagagatatgttctccttattaagaattggcactgtgggcctgccacagtggcttacacctaaaatcccaccgctttgtggggccaagacaggaggatggcttgagcccaggagtttgagaccagcctgggcaatatagtgagaacttatctctattaaaaattttaaaattaattttaattaaaaattttaatcaaaaggtgtgatggcgtgcatctgtagtcccaactactcaggaggctaaggtgggaggatcacttgagcctggaaggcagaggctgcagtgagctgtgatcacatcattgcactccagtctgggcaacagagtgagagcctgtctcaaaaaaaaaaaaaaaaaattggcacttgtgctagtgtgtgttttgtaatttgtggtatagaaccatgtatacagttgggctcagcaaatgaatgttttcaaagcactcgaatataagctgtctaaagagctcttatagttagtgttatgacatgtacaggactaaaagagacaggctacccaggtactgaatatgacttaagtcatattttccaggaacatggttacaaatactagctcaaaattttagatgtatgaaatgaaatagaatgttgagcagatttcctggagatagctatattaatgtttataagaaggagaaaaatgcatatctagaccacatattggataaaattcccaaatgttagatactgcaaagtgtaacataggaaatattgtgtcaatgctgaaggatggggaagcaatctagagccttccaaatttcacagtagagttttaaaaagaaaatttctcagactcaaagagatcacatgatgcaattcaaaataaaaaatgtgagaatacttaataagaagctcagccctttcattatccagcctagagctggtttttaaattggttgctaacattttatggccttaccaacatgtcttctaggaatcacaaaatgcacgtacacactttatgctacactttatgggccctttctgatgttcactggaagcatcataagccactttacaattcctacaggagcctgttttcattagggtggcttctcagctggcagttcacttattcatgctgaaggatgctattattaagaactgttttgaactgaaacactagaactcgaccttcatttgatgcatcattaaatagagacataagatcaagtaagtgttagtgagcagtgatatattttaaaatctattttaaaaattgcaggcatctcaaatgcaagaaactttacctttcatatctttactgttgcataaattttgcaaaatttagttaattctttggtttcatgttattaataaaaaatgatcttgtatgaataaggtataatttcacaaattatgaggtataaaatggttgattttttttgagtgttttcgtaagtgcctaaacactacttttctttttcctacagactttgtctctcctcctttttatgctttttcagttgtaatctaagagctataaaaacatctagaaaggtgtacatgcctttgcagcactgtggatgtgccaatgtcagcctctacttatgtgactcttgaaacaatgcttctatttgagcttctttcctgtgctccagcactaatcattcagcaagtatttattgagttgctattgtgtgccacttagtgttactcaaaatgaaactcgagccatttgtaatggttttgactagtaaagagtcacaatctgacattttaacaaggttcctctggtagtcatgtgtagtcatgaaacttacattctagtggttggggaggagctcgggaggtaagcaagaacaataaacaaacaaataaagttaagtgtacttttacagagaacagtgctagctatcgacaaactaaagcaggaaagagagattcagactactaggattgggggagggggtgggaggtggggagaagttttaaataggatggtcaaggaagacaccactgaaaatatgattaagccctgaagcaagtcagggcaggaaacacatgggaatctgggagaagagaggttcaggctgaggaaagggcatgttcaagggcccagaagtgggagcatgcttttatcagaggctgtgtgcaagcctggctagagtgtaatgagtgaggtgaggaagaggagagaacaagttctgagaggtcgctagattgtaaaaacctatcaggccattgtgagggctttggatttcactcagaatgagactgaagccatttgcggttttgaccagtgaagagacacaatctggtgttttaacaagattcctctggtagtcatatgtagtagaatagaccaatgtgtgtgattaatgactaagtatctccacaattaaggcttctaggcacctcaaactcaacatctgatgtatccaaaatagaaactatcatctgagtggggccaagatggcttactagaagcagctgagttgggaggctcccatggaaaaaaaaacataataaacgtatgaatccttcactggcaaccaaggtatccagtttctctcatcaaaattgactagaaatctggcgtgagccatggagagaaggaagacccacacggggaaggggacccccctcccgccagccaagggaggcagtgagtgagcgcgctacccagctgggaaaactgtgcttttcccacggaactgtgcaacccaatgatcggaagatcccactcgcaaacccatgccaccggggcctagcgtcccaaccccagaatgcgcagattcttcggctagaatctgcttaagcctatcgaacttccgggggaggggcatccagcacctgccactgcctgttgtctaagcatttgagctcctttggggaggggcagcagccatcactgggactcgaaactgcctaacatgctaagctctctgggcaggggaagagcagcacctacttctgtagctccaagctgcgcttctcccctgctagagccagggaggctggatggcttggtcccaagacttgtccccacagcccaacacactggctgtggcagtcagggcctacagtggctcttcaggtctaaccctgacccatccttcctcagtgggcggatcttccctgcaggatctccaataattccagccagaggctcagggacagaatttggatctccctgggcctgagcccctagcgggaggggcggctgcagtctctgcagcagacttagcctctccttctggtagttctgaggaatctgggcagcccagacaagtgggtttccctcagcaaagcacaccctctccatcaagggacaaagagcttcattaaatgggtcctgctccccgtgccgcccaactgggtgagaccctccaacaggggttgtcagacactctatatgggagcaattctactggcatcaggttggtgcctctcgaggtcagaggtcccagaggaaggagtaggcacccatctttgctgttctccagcctccttgaatgacatctccaggcattggaacaaatcagatgaatagggcctgaagtgaacccccagcaaactgcaggagccctatagaagagggacctgattattgaaggaaaaacaaacaagcagaaagcgacaataacaacaccaccaccaccaccaacaacaacaaaaaagacccccacaaaaaccccatccaagggtagcagcttcaaggaccaaaactagacaaactcacgaggatgagaaagaatcaacaacaacaaaaaatgctgaaaacccaaaagaccagagtgcctcttctctaaatgatcgcaacatctctccatcaaaggtgaagaactagacagaggatcagatggaggaattgacagaagtagccttcagaagatgggtaatgaaaaactatgctgagctgaaggagcatattctaacccaatgcaaagaagccaagaaccttgataaaaggttagaggaattgctaattagaataaccagtttagaggggaacataaacaaccagatggagttgaaaaacacaacaggagaacttcatgatgcatacgcaagtatcaacagctgaatcaaccaagtggaagaaaggatatcagagtttgaggaccaccttactgaaataagacatgcagacaagaatagagagaaaagaatgaaaggaatgaacaaagcctccaagaaatatgggacttcataaaaagaccaaagctacaattgattggagtacaagaaggagacggggagaatggaaacaagctggaaaacacacttcaggatattatccaggagaacttccccaacctagcaagacagaccaacatgcaaattcagcaaacaccattaagataccccacgagaagatcaaccccaagacacataatcatcagattctccaaggttgaaatgaaggaaaaactgttaagggcagccagagagaaaggtcaggtaacctacaaagggaagcccatcagactaacagtggacctctcagcagaaactctacaagccagaagatattgggggccaatattcaacattcttaaagaaaagaattttcaacccagaatttcatatccagccaaactaagcttcatatgcaatggagaaataaaatcctttccagacaagaaaatgctgagggattttattaccaccaggcctgccctgcaagagctcctgaaagaagcactaaatatgaaaaggaaaaaccaggacaagccactgcaaaaacacaccaaaatataaagaccaatgacactatgaagaaactgcaactggtgtgtaaaataaccaaaaagcatcataacgatagtatcaaattcacatataacaatactaactttaaatgtaaatgggctaaatgccccaattaaaagatacagactggcaaattggatgaggagtcaagacccatcggtttgctgcatttaggagacccatcttacatgcaaagacacacacaggctccaaatgaagggttggaggaatatttagcaacaaaatggaaaaaaataaaaaggcacgggttgcaatcctagtctttgacaaaacagactttcaaccaacaaagatccaaaaagacaaaaaagggcattacataacgataaagggaacagttaagaggagctaactattctaaatatgtatgcacccaatacaggagtacccacaattataaaacaggagacctacaaagagacttagactcccacacaataatagtgggagacgttaacaccccactgtcagtattagacagatcgatgagacagaaaattaacaaggatatttgggacgtgaactcagctctagaccaagtggacctagtagatatctacagagctctctaccccacatcaacagaatatacattcttctcactgccacatggcacttattctaaaatcgaccacataattggaagtaaaacactcctcagcaagtgcaaaagaactgaaatcataacaaacagtctctcagaccacagtgcaatcaaattagaactcaggtttaggaaactcaatcaaaaccacacaatttcatggaaatttaacaacctgctccggaatgactcctggataaataataaaattaaggcagaaatcaagaagttctttgaaaccaatgagaacaaagagacaacataccagagtctctggggcacagctaaagcagtgttaaggaaatctatagcactaaatgcccacatcagaaagctagaaagatctcagatcaacaccctaacatcacaattaaaagagctagagaggcaagagcaactaatccaacagctagtggaagacaagaaataactaacatcagagaagaattgaagaagagatacaaaaaaccctcccaaaactcaatgaatccaggatctgttttttttttttttgaaaaaattaaccaagtaggtagactgctggctagactaataaagaagaagagagagaaaaatcaaatagacacagtaaaaaatgataaagaggatatcgccactgaccccacagaaatacaaactatcaacagagaatagtataaacacctctaagcaaataaactagaaaatctagaagaaacagataaattcctggatacatacaccctcccaagactaaaccagtaagaagctgaatccctgagcagaccaataacaagctctgaaattgaggttgtaattaacagcctaccaaccaaaaaaaagcccaggaccagacggattcacagctaaattctatcagaaatacaaagaggagctggtaccatttcttctgaaactattccaaacaattgaaaaggagggactcttccctaactcattttatgaagccagaatcatcctgataccaaaacctgtaaaagacaccatcacaacaaaagaacttcaggccaatatccctgatgaacatagatgcgaaaatcctcaacaaaatactggcaaactgaatccagcagcacataaaaagcttatccaccatgatcaaatctgcttcagtgctgggatgcaaggctggttcaacataggcaaatcaatacatgtaatctatcacataaacagaaccaaagacaaaaaccacatgattatctcaatagatgcagaaaaggcctttaataaaattcaacatcccttcgggttaaaaactctcaataaactagatatctatggaacataatctcaaaataataagagctatttatgacaaacccatagccaatatcatactgaatgggcaaaagctggaagcattccctttgaaactggtataagacaaggatgccctgtgtcaccgctcctattcaacatagtatttgaagttctggccggggcaatctggcaagagaagtaaataaaggacattaaaataggaagagaggaagtcaaattgtctctgtttgcagatgacatgattttatatttagaaaatcccatcatctcagcccaaaaacttcttgaactgatactcaatttcatcaaagtctcaggatacaaaatcaatgtgcaaaaatcacaagcattcctttacaccaacaataggcaagcggagagccaaatcatgaatgaactcccattcacaatcactacaaagagaataaaatacctagaaatacagctaacaagggatgtgaaggatatcttcaaagagaactacaaaccactgctcaaggaaataagagaggaaacaaacagaggaaaaacattccatcctcatggaaaggaataaacaatatcgtgaaaatggccatactgcccaaagtaatttatagattcaatgctattcccatcaaactacctttgacattcttcacagaattagaaaaaaactattttaaatttcatatggaatcaaagaagaccccgtatagccaagacaatcctaagcaaaaagaacaaggctggagtcatcacgctacctgatttcaaactatactacaaggctacagtaaccaaaacagtatggtattggtacaaaaacagacatatagaccaatagagcagaacagagacttcagaaaataacactacacacctacaaccatctgatcttcaacaaacctgacaaaaacaagcaatggggaaaggatcttctattcagtaaatggtgctgggaaaactgacaagtcataggcagaaaattgaaactggacctcttccttacactttatacaaaaattaactcaagatggattaatgacttaaatgtaaaacccaaaactataaaaaccctagtagagaacataggcaataccattcaggacataggcatgggcaaagtcttcatgactaaaacaccaaaaggaattgcaacaaaagcaaaaattaacaaatgagatctagttgaactaaagagcctctgcacagcaagataaactatcatcagagtgaacaggcaaccacagaatgggagaaaatttttgcaatctacccatctgacgaaggtctaatatccaggttttacaaggaacttaaacatttacaataaaaaaaccatcaaaaagtgggcaaaagatatgaacagatacttcttaaaagaagacatttatgtggccaagaaacatatgaaaaaaagcttaacatcactgaacatcagagaaatgcatttcaaaaccacaatgagataccatctcacagcagtcagaatggtgattattaaaaagtcaggaaacaatagatgctggtgaggctgtggagaaatagcaacgcttttatactgttggtgggaatgtaaattagttcaatgattgtggaagacagtacggagattcttcaaggatctagaaccagaaataccatttgacccagcaatctcattactgggtatatacccaaaggaatataaatcattctactataaagacacatgcacacatatgtttattgcagcactatttacaatagcacggacacagaacaaacccaaatgcccatcaataatagactggataaatgtggtacatattcaccatggaatactatgcagccataaaagggaatgagatcatgtcttttgcagggacatggatgaagctggaagccatcatcctcagcaaactaacacaggaacagaaaacctgacacaggaacagaaaaccaaacaccacgtgttctcactcataagtgggagctgatcatggagaaaacatggacacacagaggggaacaacacacactatggcctgtttgggggatggggggtctaggggaggcaacttagaggatgggtcaacaggtgcagcaaaccaccatggcacatgtatacctgtgtaacaaacctgcacgttctgcacatgtaccccgttttttattttttagaaaaaataaagaacctattctcttccacctctagtttcctccttttcctgaagaaattttagttgatgatgctattattcatcattcaccttcttccctgcttttactcacatccttatctcaccaggttcttactaagtccctcttcaaccaggacctgcgtttccatctccaaactatttgtttagttcagaccctctccttgaaccgtcacaatagcttgatgccttcatgcctcttttagtcttctgaatccctctaattctagctaatacattgttgtcaaaatatacttgaaaaatacacatgagatcatatcactcttcttaagacccttctgtggtttgttttggaacacagtctccttaacttggcattaataatgactttataatctgacctacgtttctatccagatttaccaaagtgtaggattcagaagtctgattccttcttccagtcatatcatttgtctcttgtccagttagctaacatctactcatctttcaggacatgtggtagactgaataatgtcttcctcaccctcctcccaatttccatgtcctaattcctggaacctctgaatatgttatattatgtgataaaaagagactttgcagaagtgattaaattaagaatcttggcttggggatattatcctggattatctaagtgggcccaatataatcacaagggtcattataagagggaggtaggaaggtcaagatcaacaggagacatgaagacaaaaacagaggtcagagagagagagtgtgttgcagatgttacacttctggctttgaaggtggagtaaggggccacggaccaggaatgcaggagacttcagattctgaaaaaggcaagcaaacagcttctcccttagagcttccaagaggaactatccctgccaaccccttgactttagcccagtgagactgattttggactttcgatcccaggaactgtgagataatccatttatattgtttgaagctactaagtttgcggtaatttgttataggagcaatccacaactaatacaagacatgaatcaaatgtgttaattttttgaagcttctcctcagcacactgttcacctccaccacagctgactcaggcgcccggtccccacagctccttttctgttcagctgtcatcactttgttcacagtattgtaactatttgcttgtctgtgatgcttgagggcttagattttaacctcatttgtctttacattagcagtacaatgcttggcaagtaggaggtgttcagtaaaagatgagcgactttctactataatgtgatacatgtcaattatcacagaacagaaagtttgaaagcatcttattaaatttattgaaatataacatatatacaggaaagagcacaaagcataagcttgcagcctgatggattttcacaaggtgagcacacctgtatgaaccagcacccagatccggagatagcactttatgggtaccccacaagccctctttgtcctctcacccttctagagaaggcttgacttctaacacccgggagcatgtgcagacaaagcacacgttttggtaagaattaggaattttgactaaaaactgaatctcccttttgatcgagtaagaatgaggataggaatgtgtgggactcataaaagttctctcttttggggcctccattccttcatttggaaaatgaggagatattcagttccttagttcacctcagtgtatgagtctaggacttgtttctgtgatatatgagttaatttgtgcaaaaaacacagatgtgatgcttcaagtttctatattattaatttaaattatacaaataatatgatttatctaataatctagaaaatgaatgtagcacaagggtaaaggagagatgatctggtatgattttctaaaactcttctcttttctcctaatccgttactgcatgtattttagaaaatgtgtgagaatatctgtttactttatcaagtaaataaaatggcagaaaactttccttacaaagagatgtatttcccgaaagggtcttagaggttgttgatttaagtctaatattataagtttcccctgaatttaaaacatagtgtttctatactattataaactttgagaactgaaggattaactctggggtctttaaataaaaatccatattaataagaaaattgatgatggtgattttaaatggaagatggtgattttaaatggaaaaagttgatttattattcagttgcttggagaagaaaacaaattctcttacttgttaatacatttgtcatttgtcagaagataagacatttattttaatatagtatttattattgaagaatttgccctagatattcacagattagataaaagtacctgagatatgatagtaagaaagttaaagtgaaaaccaaatacctaataaggaaatagaacagaaactgtttatattttaataagtagtattatgatattaattacatcaactttaactcagaattttgaaaataatctattctgaattttggcatacatttttatgagacaaaatataattattactcaacagatgataacaaaaagtactatttattaagtatacaatacatatcagaatctttacattaatttttttttgtctctatgatgctgtatatcaacctcaaaatggagatttttttgttgttattgttgtgtcttgcatgtaaggaaatggaagtgagattaacatcaaagtctcttagctaatccattctgaaatctgtatttgagtctagagactctgacttaaagtttaattttcttttcatcacctcaggcagcttcactttgatacatattatggttgataagcccctcattttacacattcttcttggtttgaagaaaaggcctttggcaataatccttttccttttcctctcactgcaagtcctatctagaatcagtgtcatgttggaatgcacaactcagaaggaaggcacacgccttgggagacacaataccatatcctggaattctaagcatcttttttggattcctgtaatgactaccacaaagattggcaagtttggaaaattagaacaaagcaaagtggttagacaaatctgctgttgctctgcaaggtgcctagtgaagacaggtgctgactcaaatgagtgagaaacacctcctcacagtctgctgtcctaggtggtatctttctacttctgctcacactcggaggctatggattaccttggaaatccatcaccaaaatgttggtcaggagaaatctagcctatccgacctgcttggataacaccacatattttaaaggaaagattgccaagcacttgcttggcaccactgggttagctttcaaaggaagctccttgggggagggaggttaatgcctggggagaagtaaaatagctgagaaaagcccatttagccgagtctttgtggcagtcagtcagagagtttatatttttcacttgattgtttttaaactagcttttctccatactatggtttctgattatttttgtaagtaggcctcacagagccatcatttattctgacgtcactgaatacttagattatgtagatggatttctgtgtaacccaaactagataaatgtatgtttttgatctttgggtctgtatttttggttctttgtctatatttgactataagcaaagagagtggctatgattctactttttgcaccttctgtgatgccaagagcttttttgtttctgacatacgaccctgggcaagacatctaaactctttggatctcatcttcgaaatggaaatagtcactgcttcatatattttatcaaaaagcttgtattacatgaaaactcttggaacaccaagaaggtcttggaggcttgcagacacaagcagtcgccccttccaccctgcctggcctgtcatgcagtcttcactccagcacagaccatgacatacctccatacctttcttcatgctcttgcccttgactcgtatgttttattaccaacaacaaagcatatagaagttaagaaaaattaaatagaagaggaagagaaagggaacttagatttcatgtcttactaggtattccctgagagacattcttaaaggatctacaagagtgggtcagtggtttgattgagctaaatgtttgaatttggttaaacataaaaatacatacagaaaaaattgactctaggccgggcgtggtggctcacgcctgtaatcccagcactttgggaggcccaggcaggcggatcacgaggtcaggagatgaagaccatcctggctaagatggtgaaaccctgtctctactaaaaatacaaaaaattagctgggcgtggtggtgagcacctgtagtcccagctacttgggaggctgaggcaggagaatggcgtgaacccaggaggcggagcttgcagtgagccgagatggtgccactgcactctagcctgggctacagagcaagactccatttcaaaaaaaaaaaaaaaattgattctattatacatttttgcaaagatgttttaatgtcccaggggaacaactgtaacttcctagctaaatttttaccttggtgcttgcatctgcatagaatctaaacaaacttaacaggtcattttgctcatgtttatggtatacaccaggatcagcaaactatatgggtcaaatttggtctaccagctgtttttgtaaataaagttttattggaatacagcccatgctcctttgtttatgtattgtctcttgctgttttcatgctacactggcacagttgaatagctgtgttagaaacccatggctttcaaagtctaaaatattgactatgtgactttttacagacaaggtttggtgaccgctggtatagaccaattccagttaaactgaacccatctatgttcttctgtaatataaggctacttgatttatatatagcctaatgtctaggattctaaatttctaagaatagccctggcttcatgggcatttggcttaatgctctactgttgccatgttggaataataattgttgaaaagggtcctgcattttcattttacataaggccctgtgcattatgtagttggtcctaagaacatatatttttgcaacattaaagatcaagattttctttaatccaaatgtgagggaaaaatgaattactatccctataactgtacttttttttcttttttcttttttctttttttgagacagagtctcgctctgtcaccaggttggagtgcagtggcgcaatctcagctcactccaacctctgcctcccaggttcaagcgattctcctgtctcagcctctcgagtagctgggactacaggtgcccgccaccatgcccggctaattttcgtattttttttttctttagtagggacggggtttcatcatgttggccaggatggtcttgatctcttgacctcatgatctgccctcctcgacctcccaaagtgctgggattacaggcatgagccaccgcgtccagcccctacaattgtacttctatataggttaccaactttggcaaataaaaatgcaggatgcacagttaaaggtgaatttcaaataaaaaacaagcaattttttagtataagtatgacccaaagattatatgtattttgtctgttaattctacttctacccaactggtaaaagctctttagaggtaataataaagaactcattttaaatatctacactgcagttataggacatgccacagaaattattttaataaccaagtaattcatgagattaaaaatcccctccttgcattttcactttcttgttagcgttggtcttggctgaagattctaatgcttatcaattcatattttctgataaaatgttcaaatggacctaaaattagatattcgttcagcatcccttttccagttatccccggtctagatttttagaccattcttcccagagctgttaaattgcccctcctatctaagcagataaaaaaggttatgaataaaacaaaaagcagactgagcaagtatttaaaagggcagagactttataattactataaaactaggtgattaaatgttgaccagatgttgttatatgctattttgaggttaaaaacattgaagttgtaatattttgctaaaacttaaattgcatagaaataaaggggaataaatcaagggtagttttaaagaaataatttataaattagttctatactaaggaaattaataagtgaacttgtataagtacaatttcattagtatataggtaacattaatttgtatatatttacttaagtattaggctgatgagtcatatagatcaataattccagaaatttatcctcatggttttttccatgtaagcagaatagtcacaaaaatatatttctgaggtaaaattagaagagatagtctatttttaaaatttttaaaattagtaggttatcaggatatatgtaggcatgtcatactcttttaaacattccctgagcaaggcgtatgccaaacctttctttatgtgttgtgtgctgttttctttgagtgatacaatttaaagtcatacggtaattcatacactgacagttcatgtgcttcatttcccttttaaaggtgaagttaataacctttaaaatgaaacacagtactcaatgagaaatatttttttaatcaatcaaattgtatatatttacttttctaaaatcacttaaagataaaaacgtttgggaagtacctttttttctaaggcatgattgattattttcagatctgacaactcaaaagtgtttatgaacatgtcattatatttcattttactttgagacaaggtctcgctctgttgcccacgctagagtgcagtggtgcaaacatggctcacagcagtctcgacctcatgggctcaagcaatcctcctgcctcagcctcctgtgtagctggaaccacaggtgcattccaatgtacctagctaattttttgatttttttttttgtagagacagagtctcactatgttgcccaggctggtattgaactcctgggctcaagtaatcctctctcctcagcttcacaaagtgccgtggttataggcatgagccaccatgccttgcctaaacatgtcatttttcctttgaatttagaaatacatatgcatggattttttttttcataaaataaaatcctaagtagttagagagtaaaaaataagaaagttcctatatatttcacattttcaatcatgcatacaatgaaaaaagccagttgttttcctgcatttttagttaaccattaaggatgttaatttccttcataacacaggccatattagtttattctactataaagtggatagcttttagatagggacaggtactagaagaaagagagtctggatacttgtagggtttgtaagttatttccatgtgactgaaacttgataaacatttactaatataataggaattcctttttcaggtgtaggcataatatagattcatcttaatgaccccacacatattgctgccatataatcttttcacaatggctactttattattttattataacaaaatttcagcacattgataatattttaatggtgtataattgatgtattgggggtgtgggcagtaaaatattttaatagtacatgattgttgtatttgggaatgtggaagtgtgaaaaaaattaaacttcatgtggaccctagaattgactttgctcttcccattggtatttaattaggatctttatgttgaaacttaacaaaatttcaacagagtgttgctgggcaacctttagttgccttgaaaactcataatgaaggttgaaaatttcaatatatgaagtatttgtttaaacttttcattcttactttctctgaaagacgatacatttagagacttgtagaactataagtgaatgttgctatgttttgaactatgcatagtcttgttatttaatgaaattagtgtagttgaaatatgaacttaaactatattttatagtcattgttgctcatgaaggactcaaaataagacatgaagctagactgagagaaatcatagcttacccgggaatctgtcttcattcattcaacaaatatttatttatttaatgactactatgtaaagtgctggggatacaaacatggatcagatatttctttcccgaagaagttcattgtatggtgggtaacagatatttataattaagacttagaaataagatacacttataaatatgacacaaagggtgatagaattatgcttacaatatcttgtgaacaccctggagtggcaatttcccagtctaggtctagcaagagtgatctggcaaggcttctgagatgaatttgtaacttaactgagttgtaaaatataaaaataagttaaaaagtagaagtatatgggagaaggatttcagatagaggaagctgcaggagaaaaggggaaggaaaaaagaacatgatattgtgatacacgacatttactgttttttctgtgaccttgattctctggcatctcgggccttgatcctggagagattgcccctcccagagctagctaattcctagagatagcaaatgaccctcctgcaagtacacttttcatatacacacaagccaaacaatgcagagcccatgctcctaaccatttcctttatcaaactctcttacacatcaacctaatattctcctgccctaaatcaccccaggaccaggtatcagacaactagggacagttcctatagcccagagtcctgcaaaattattcaagctatccaatcctaagcttacttagtgtacctaccctgcctttctcattccttttcaataaatagccaacaaggatttgggccatgctctttcgtctcacctcctgacctaccctggtcattccccacatggccctgcatggtgtgcagtgtctactgtttctagggatctgtgagtacggacttcttccttcatgacagtcatttttgtgtcagcatgtcttatatctgattaaaacaaaccctaagtacactttgagaacagacatcataagtaattcagggttaaaacaaaatgtgaggtaaggacaggaaagaaacagggatagagagccaggcagaggtcagattgcacaggacaaagaaacttgaccttaaataatgtgggcagatccatattaatattgttttaggctacatatttttttggtccctgtgtgagtaatgccattattttgagtatctctgaagagttttagtttggtcatacataatctccaaatctcctatcttgtaattgacgttgctgacaggtgagaaagtattcttagagaccggagaatagtaccatctatgcgtcttttttcttttctttttcttttctttctttttttttttttttagagggagtctcgctctgtcgcccaggctggagtgcagttgcgccatctcagctcactgcaagctccacctcccgggttcacgccattctcctgcctcagcctcccgagtagctgggaccacaggcacccaccaccaagcccggctagttttttgtatttttagtggagacgggatttcaccgtgttagccaggatggtctcgatctcctgacctcgtgatctgcctgcctcggcctcccaaagtgttgggattataggcatgagccaccccacccggccgtgtcttttttctaatcatctttatattctgcaaagtagatatttacacttttgtaacctctaggagaacaaataagtggggagtagtgtcagagaacccttcttatttctgattcatcaagggctctgtgttaccatgactgacaagacaaattgtgacattcacaatatgttattattggacataaaaccatattttttcaaaaaatcaggaaaagcaattcatcaaatccaatgaaaatatgttaccaagtgaagctagataaattagatttgcattgctttaggagtatacatgtctcacatagaggacctataatcatttgaaatgatattggcaaatgctcagggacagctatgtcagattcttcaggaattcattctcactatggaaatggctttcagacctgcttgtaatatagaacatagaatgctatagtacgctgtcctaacatggaatagaaatgaaattccaggcacatctgtcgtttcttattttctggaactctcttcaaaattcttgaggagaaattaaggtgatgacttcctcttggaattttgcattgttgggtaaattacctagaaactgatgaaaataatatgcaatttaaaatgtccaattaaaatcccttagaagtaaaatatattcaaggtttaatgctggttactgtactaacttatgtgcaacaaaggaattttgaaatatctttaaactctggcataatgtggtatgatactgcccactgaaattagtgatcttttaacctgccactggtaatatgctaagtttttcctctatttttatatgtcccattgtatttagcatcatctaaggattttaaaatgcactatgaacttgaaatacaactttccacttgaaaccgggtaaagtctggctttaaatggagagtaagcctagcctatttagatacccaagtgacagttcagaagcttgtggcttagttgtcctgtgagcccctcacacacttagatttatgttctataaaatcatgcctgccaggcttgcttcattgagaaccaagtgtgtcagcagatgctgaaagccagaaatccctatgcaaggaaaagcatttctaactttttaaaaatgaaactcagtatttgattagtgtatatgaagaccatttgtattatcctatatgctgtcataatcaaaaggtttttctgaatatattgtttcagaaaactgttgttaaacatccctgtctatatctactttctttttctaaatgtatatgaatgtgcatgtccatgtccatgtctatatgtatacatatatctaaatctacatatctattaggggagataggcttagaaaacatttatggagaatgtattggagagagagttaatatcaaagcttgtgtcagtgggcaccaatagtgcactgccttttggaaatattccctattactcttaaatgcatctaggtaattaatatgttgatgttttattagtacctattgagcataaagcttttaaaatagcaataagtgatatattcactctctcgttatgttaccgataaaatatggaaaatgtgttggggggcgggtcccaaagaccaccactgagtgtgatgagttgctaagaggactcagagaactcaaaatatagagttacattcgcagttaggatttattatagtgaaaggctgcgaagtgaattagcaaaagaaaatggcccatgaggtgaaattcaaagggaaccacacacaagctttcaggagtcttctctcggtagagtcacacaggacttgcccatttcctacagcaacagattgtgactacatgtctaccaggaaggctcactgaaaactacagcccaaggatttattggtggctagtcatgtaggcaccctgtgtctgggatgtacaaaaatttgagacttccaggaggaaagcaggtattcagcataaaccacattgttaatacaaacagttatggccctctcatcagtcctgacaatggtagaaaccctctccacctccaagtttctatactccagctcagggccaaacttccaagcacggatttctagggataacagcttcaggctgctgttaactcttttctgcacagaaaacgaatatattgacctatttggattcttgcatgagtattaacattattttttcccctagggtattaacttactttagcagttaaatttacacactaattgagaacagttaacttcaaggttcctttgggccaactaaacatctgctgtctataaattttagattactgcaaaataaataagatttaattttcattgcaatagagaattgtatttaagatgttatttctgtaaatgaatagtaaggctagtctcattcatcttggataatatttttatacttccatttcagaagatgagattctctgaccttattttctaattttgagggaaaacacaaactcagatttatcaaatcttgtgcatagattatgttatcttaaatttggggagcaaagaaagggaaggtatacatatgcttgtgaattaaatcaatagcattgatattgggttattggtgtttgatcgtcaatatatctaccttctttaattcattcctcatactgacccggtgtaatcattaaaacacaaatctgataaagtcatgcttaccccgaagctcttcaatggttgctctgattttcagtctctcacattctctatgcttcctctgccactgtgtctttgctagtccctctacctggaactctgttcccttccttttttacctagtgcacttctactcattcttaagctttcagttaatatatcacttccttaatatttctgactgtctaggactgattccattagaactgataggttcatataacatattaacatacttttcttccccggcatttgtcacagttgaaaatttacatttcttaaaatggcattgataatatctgtctttcccattagactgacaactcctctgtattcttagtgtctagcagaattccaggcccatagtatgcattaaataaatattttttacatgaaaacattgaaacagtttcatttgttcagtgcactcagatcattagaactgaggtagggttccaattcctacatttgatatttcggatcataaagaacggcaactaagctcaagaaaggtttacataaaaactagggtatgtctaagtcaccctccagaggaaggatggacatctctcccacaaatttggttcaggtgtcaagattgatgatgccacacatgccacaagagggtatgaaaggcacattatttacataatgagactttctggggagagcagggcatgtttctaagcaggtccaagactgccatgaaaagcagggaaaagagactcgcttgggattttactgtggttagggggttggggcaaagtgagaattcttttatgtattggccagggcttgtgtgatttgaacttcctgttgccaccagaggagggagcatctgggctttcttattagtttgcccagatgtggtgcagaggaagaagagggaggggtgagatttggggataggggaggctactgcctcctgcaggtggaaatggcccgaggttccgggtttgtctttgtagcaaggaggcctcagtggaagtgctgagctttccaggtgctgttttcatgacccaaagcataatgtgcaagtgggtatgtggagttgagggctcaggccctgtgagagcctccattctcaggagagcacagaatgcagccagcaatgctgttctaatggtgtgtagtatggtgccgaacaggacaatgttcacaggactcatcacagagtccatacgcaagttatggccattataggtgatccagatgttccaggagacatgagaggaggtttctaaaatgaagaagtcttgggggagggaggcactagggtgaatgccagctgtactgcaaatttgggcagattctagaggcttctgttgtaaaagggggcctcattaaaggggagctgatatgtaacaccctaaatggtaaaatttaaaatttggtaaaaagtaagtttaacatgataaaaagtaaaatttgtaatgcagaatatgttgcctccagaatccacaaggcttaaaagatgttgagcatgtgggtattgagggtcaatggctgtttcttgacagtgtcagggatagagtgattcttgacttgctaaataattttcaggaatttaaccaaggtgatgaggccttgtactgtgtgggggacaatggcacattttttctttgtgaacttatttgtgaatgtttgcatgtactgaataagtgtgtgaactgactctccttagaggaagatgtcatcagcatgatgaaattcctctgctcctggagaaggttggatgaagtttagaagttgccttcaaacattgtgtgtaaaagtctattagggggtgcatagatcttctggaggcctggaggaccagtcaagaacaaaatggacttccacttcagtaggaagaggctggacattgctttccacctattttgggattcttcacaaagacaaaggtttatttttatttttaactggtctgcaaaggctataaatacaagctgtactgtattatgaagtcttagtctttgcttgggcaccatgcagttgcaacagagacctcagctgatcccatgggtatctgtgaagttgcagtgaccctaaggcgatgccccaagttaaggcaaagtgtggaggtggtgtgaaggctttgtaccttgcattgcacagtcactggggaagaggagtaaccttgggcccagaagctccttttagcagagggccatttttaggaaacggctcagctgtgtgctgtcagtaagcaaaactcctggcatttggataaatgagtgccttagtttagaagagaggatttgagtgttgtatagcatcatcctctataaatgaagaatatatgtattagtctgttttttcactgctataaagaaatacctgagactgggtaattaataaagaaaagaggtttaattggctcacagtttcccaggctgtacagaaagcatgatgctggcatctgtgtagcttctggggaggcctcaggaaacttccagtcatggcagaaggtgaaggggaagctggcatgtcttacatgtctggaagacgagcaagagagtgaggggcagatgctacacactttgaaagaaccagatctcaaggaggagcaagagagagagggggaggttctatgtacttttaaacaattagatctcacaaaaagtcactcagtagcacaagaacagtgctgaggggatggtgctaacccattcatgagaattccacccccatgttccaatcacctcccaccaagtcccacctccaacactagggattacaattgaacatgatatgctgtgctcagtggcttacgcttgtaagcactttgggaagccgaggtgggtgggtcccttgaacccaagagttcgagaccagcctgggaaacatggcaaaacctgtctctacaaaaacaaacaaacaaacaaacaaacaaaaatcagccaggtgtggtggtgtgcatctctagtcccagccactaaggaggctgaggtgggagaatcgcttgagtctgggaggtcgagcctgcagtgacctgtgatcaccccactgaactcctgcctgggcagccagggagacagagccagaccctgtttttataaaaaaaaaaaaccaaaaatatacttgaatatgcaatttgggtggggacacagatccaaaccatatcaatgtgcctcctttattgtctataaatatgcttggttactgcaatttctacactgccttgtttgctgcataagataaattagcagagtagccatccgatgtggctttttcctcccacattttgaattactcctgtcaagccagtgacctgtaaaagccaatggcatgctgggtggcattgttcttgaggtgattgctcaggatttatacctcctcacttctgtttagtttggtcctagcctgttatcacttctccattttgtctttctagcttcacactgaattttaatttctaaacctctccttggctgtctgtctgtccctgactgatgggcacttcccagccgccttctattcgggagactgtgggctagctcagtggactagcctaagtgacaatttaagctagggaaaagggagaacgtaccaaaagatgttcattggagaggaaaatgatacagaaaataaaaataataattctctgtcattagtcaaaacattctttcaaaagccccttatgttgttcgacaattgagacataactgaatctcctgaacatatttaaaggttatagagagcctagagtttgggacagaaataaatgagataaaataaacaagagacttttgccctttgccttgatccaaatgctaaaatgctagttagaaacgccatacaaatatattaggctgtacgtcattagaagaaacctaaaatattattgtgtttactgttaaaaattacttgtaaaattttgaacttgcttttataactctaaacacaagtgaagttcaatgtaaaaatatacatttccttctaaatatcagccagttaatcatatatgtatataaatgtggaaaatatgcttctctctctttttatttaaattcttaaattcttcaggactaaataaaatttaaggaagagctgcttatggcatcattgcccctactttcctgcctccatccaatctccatattattcctacactagtcttatgttttccaacattacagattactcaattcacaatatgcagaggtcaaattagtatattgtcaacctcattttttttttgttttgttttgtttttactctggatgacgcatttagcatgagtaactctcataagtgattaatgatggctccatacaggccagtcatttaatgctttatttggactttatttttgttgttgtgacatttcaaccaatcataaaatgtcacagatgaaattaaagcaaactaagattatatagcttaacattttatttagttttgggccatattaagatgcctttgtttatacagttttctcctacaatgagttttataattgatatcttaaaatagtaaatgtaactcaatgtatcataacttacttaaattggatgtggataaaatgtgtaaacatacgcttggcaaaagtgtgtgcagttttatgttgtaagattaagtaatatattgtaattcttatacacatttctagaaaagaaaatattaaagcaaataatttattatacaaagcacttatctgtagacggttttcaatagatggttgttctcttcttaccagcccataactataacttgctttggtttatgttaacagatattaaagcaacttgaatgtaagaatattgatattatacctgaaaaatatagaatatttttcttataaaagactgaattattttaaagtcttcaaagttgtctactaatttatgttactgtcattaaataatgaccttatcattaaataaatgaccttactctaagaggttaagtgttacttgacagcctttttaattatttcaaaacaataagagatatatttccatatttccagaaataatgttattcttataagaagtattattttaaaatatccattgcaagtaagctaaaagaataaattaagaaaacattgacattgtgagaatttatggcttattctgcttgaagcattggattgtgatttgagtttactaggaaaatatcccaaatatcctccttttcttcctttattttacatagtactggccaattagaaaaaccaaacagaaatctttatgctgctaagtgaaatgagtgtttgtacttgtgactcaagtttgtagtaatgtgctttactttggaatttaagagtttggttgtgcaagagaggatgtgtgccaattatgcctgcagaaaggggcaagtctgagaaatctgcccccaataccatggaaatctctctctctctctctgtctctctcaatctctttttgggaaaaaagaaagacaaagaaaactatggagacaaagagaaagggtttaggtttgcatgtgtgctcctgaagtctatcaatagaaacaggaacgtggggaagtcggagagatgtatggataaaaggaagaaaggtaaacattatgtctggggcttttgtgtcatgatgaattcctccctacaagaagagttggctggaagccctgggtaaagccgcttccatttccagcctccttttcacttatctctactattgagtttatggttaattatttttacaaatcatttccctcttgccctcttccctacaaatcagttgctaagtgactgggagatagagtgacctccgaatttattctgctcattatatcgttagatttttccatatcacttaagggatggatttgttcatgtaagttcagcacctctccaggattcaagatgacatttcacctaattaatagcccctattggcctagttattttgaggatgtgtaattaaagcaatgatactacttgttcagaggaattaagattttattttgccttttaaattaattgcccaaagtgtttttttttttttttttttgcttaagtcttattattatgcccatatgtgttatgataaacatattttgaaaggccatccttacaaaaatttaaaatgttgaacttttaagatttaaaaataagcctaggccaggcgcggtggctcacacctgtaatcccagcactttgggaggccaaggcgtgcggatcaccatcctggctaacacagtgaaaccctgtctctactaaaaatagaaaaaattaggcgggcgtggtggcgggcgcctgtagtcccagccactcgggaggctgaggaggcagaggttacagtgagctgagatggcgccactgcactccagcctaggtgacagcgtgagactccgtctcaaaataaataaataaataataagcctatatatatgtacaatattttaatctaatgggaatttcttaaaggcactaattttggccttttatttttgagttgtttatttttgttcacaaagtcctcagtatagtgcctcactcagaatagatactgttaaatatttatagaattattcattgaatcagtgtgatgataattggaataaactttcttttaaaaatgtttaatattaaacatgactatacatataaataattctacttctctttataagtaattctaaataaaaatcagaatgattttgtggacaacattccattgctatttttaatttgaggtttgcagtcaatatgtatttatcttctgtgatgtgaactgttatttactgatctatcaaaattatatatataagcatatatatagcatttaccatatatgagataatgtattttatgctttacaaataggtatcttattaatgaggaatcattaaggaaaaaaataccatcttttctttccagtaactatttagaaaaaaagaccatgtataattcacatgtgtacatatacaaacctagcaatgattaaagatgtggagaatacaaggacgttacatgctgagtattctgtgtgtcggatgatggctgtggtgatggtatatagggtttcttgcagtaaccaaggagctgagttgtatgccagttaataggtataatgacaaaatgcattgagaaatgttgaaggaaaagatataactaggcaaaaaataacagtttggatacttcacctgtgtaaatgttttttgtgattgttagtgaaacctgaattggtagtatctgttgaaccaatttaagaatattttattaattttacaaattataaggatgacagaaaaaatcttatttctctatattaatacaattctgtatagaatgttttagaaaaataagtgaaatacttgtgtctaggttcaggctccaaaatacatgaattttaggaagaactaggggagaaaatgtcaattcctaagaggcaatttttaagatgtttcaagtgtttgctggccaaattttggtgagaaatgtaatgtgtgtttaatgaatagcatttgggcatttagatctgactccttattgcctcatggatgagatgtataaattttgaaagtttcctaaccatttaccatttagacctctggtttctctatgaaaataagttgcttatgtgtttactatgttttcttttagttcaaaatacctgaatctgttattctttcacgtgctgtaataatatttcaccttattaaaaatatgcatttttcattatgaaacaaatatacataaaagtagagttattaatgtgcatatttctatctatattttctaaaactatatttgtaactatatttgttttaaaagattggggacatattgtaatactcttttgttaccaattttttccattttacaatatattatgaacatgtatctgtgtcataatttataaatagctaagtggaattatgttctaacaataattacttcatcattttctttttattgaacatttagtgtttctattattttattataaataatgctgtggtaaacattattagggattaatcttatggattaaaatatagatatttgattacttctttagtagaagttcttaggtatggcattgctatttaaatcttaaatacattgtttttctttcaactttttctgttatggcaaaatacacagaacataaaatttgccatcttcaccatttttaattgtacaattgagtagtgttaagtacattgatcatgtgcaactatcaccaacagtagcatgtcggaatttccttcctttttaagggtgaatacttttctattgtgtgtatatatgtggctatatatatatatatatatatatgctatatatatatgtgtgtgtgctatatatatatatatagcacattttgctaatctgttcattcctggatggacatttgaattgctttcatgttttagctagtgtgaataatactgctatgaagacaggtgtacaaatatctttttgagaccctgctttcaattcttttgggcatataaccaggcatgggattgctggatcacatggtaattctatttttcattttttaaggtactgctgtgctgttttccagggtggctgtactaattttcattttcaccaatagggcacaagggttcatatctctccacattctcaacaacgcttgttattttctgtagttttgattgtttggtttttaattttttttgaaataatagccatcccaatggatgtgagatggtaacttgaatacttgaatagtttttctttttgagatggagtctcaatctgtcgcccaggctggagtgcagtggcacaatctcggctcactgcaacctccgcctcccgggttcaagcgattctcctgccccagcctcctgagtagctgggactacaggtgagcaccacaacgcccggctaattttttgtatttttagtagagacggggtttcaccatgttggccatgatgatcttgatctcctaacctcgtgatccatctgccttggtctcccaaaagtgctgggattacaggcatgagccactgtgccctgccaacttgaatattttttaaaaaaattatttagtgttagtttctacgtattttggatttgaatttctttttatctgtattatttgaaaatattttctcccactccacaggttgccttttcactctattgacagtatcctttcatgaacaagttttaaatttttatgaagtccaatttgtctatttttgcttttgttgcttgtgtctttcatgttatatccaagaaatcattgacaatccaatattgtgaaggtttgttctatgttgtcttataacagtttgattgtttttgctcttacatttagatctttgatccattattggttaacttttgcatttgttgttaggtaaaggtccaacttcatttgtttgcatgtgaatatacagttttcccagtactgtttgttgaaaagactgtcctttcaccattggatggtcttggcatcctggttgaaaattaattgattgtttatgccaaggttttttctggggttcctattctatttcattgatctatacatcagtctttatgctagtactacacagttttgattattgtagctttgtagtaggttttgaaatcaggaagtgtgggtccttccgttttgttcttttttcaaggttgttttggctacttaagtctccttgagacttcatatgaattttagggtggatttgtctgtttttgcaaaaatcaatgtgattctgataaggattgcattgagtttgcatatagctttggctagtattgacatcttaacaatattaagacatccaatctatgaacatgagatgtctttctattttttatgccttttaaaaatacatttcagtattttttctttagttttcattgtacaagtgtttttccttcttggttaagtcaattcctaagtatttcattctttctgatgctattgtaatttgaaatgttttcataatttccttttcagattgttcattgttagtgtatagaaatgcaattgatttttgcgcgttaactttgtatcctgctgctttgctgaatctgtttatcagttctaacagttttttttttttttttttttttttaaggaatcttaagggttttctatgtagaaaatcagattatctgtgaacaaatataattgtactttttcctttcaaatttggatgccctttctttatttccttctttcctgtttttttccctaattgctctggctgaaacttctagaaatttgttgaatagaaggtgtaaaagtgaacatccttaccttgttcctgatgttagaggaatatcttttgctctttcacaattgagtatgatgttcacgatgagtttttcatatatggttcttattgtgttgagatagtttcattctatttttagtttgttgagtgttttttaaaatcatgaaagggtgttgaattttgtcaaatggtttttctgtatcaattgaaataatcacataatgttttccttcattccattaatgagatatactacatagattgatttttgtatgttgaaccatccttgcattctagcaataaatctcacttggtcatagtatataatccctttaatgtgttgctagtattttgttgctaagagtttgtcaatattttattgaggattttcccatcaatattcacagggatattggtctgtggttttattttcttgtaatatctttgtctggcttttgtttcagggcagtgttggtctcatagaatgagtctgtaagtgttccctcctattcaatttttagggaaagtttgaaaataattggagttagttcttctttgtatggtagaatggtagaattcatcagtgaagccatcagggtcagggctttttctttgtcagaatgtttttgattattgatttaatttccttgctagtaacaggtctattcagattttgtgttttttaaattgagtctgtattagtagattttgtgtttctaggaatttgtccatttcatttagttcaagcaatttgttggcatacaattaatcacagtaatctcttattgtcctattcctttttttagaatttgtactaatgtccccactcatatatccactttcatttctgatttcaggaatttgagtccttcttctttatcttactaaatccagctaaagatttgtcaattttgttaatctttttaaaaaacaaactttcgatttcaacaattttcttttttgcttttctattctctattttgttggtctctgctcaaatctttgttattttctaccatctgtcaggtttgagtttaatatgttcttctttttctaattccttaagttgcaaagttaggttgttattcaagatctttctctcttttgtattgtaagcatttgcagctctaaatttctcccttagcattgcttttgtggtggcttataggttttgttatgttgtattttcattttaattcatctcctagtatgaatttatattttcccttatgacttcttatttgatccattggttgtctaaaagtgtttttattaatttctacaaatttctgaattgttaagtttttctctgttattggtttctaacttcatactgttgtgaccagagaaaatagtgtattatatcttggactaacatatggcctattctggaatatgtcccatgtgcacttgagaatattgtatattgttttgaggaagacggttctgtatacgtctattagctattgttcatttattgtgctgttcaagttctctatttctttacatataatttgtatttgtatggttgttatatttactatttagaatagcatgttgaagtctccaactactgtcgtacatctgtcaatttctccttccagtcttgtgaatttttgcttcctatattttgatggtctattattaggtgaataaatatttataattgttatatcttcttttatattgaatgctttattaatacagtgtcctgtttgtctcttgtaaactttttttgatttaaagttactatgtctgatgttagtataaccatccctgttctctttatggttactatttgcatagaatatcctttttagtttgttttcaagacagggtctcactttgttgcccaggctggagtgcagtggtgtaataatggcccattgcagccttgaattcctggctcaagtgagcctcctgcctcagtctcctgagtagctaggaatacaggtgtgcaccaccatacccagctaattttataattttttttttgtacagacaaggtcttgatatgttgcccaggctggtcttgaactcctgacctgaagagatcctcccacctcagcctcccaaagtgctagatgcacaaatatatttttccatcctctgactttcagtctatttctgtctttggatctaaagcaaatctctcatagatagcatatagttggatggtgttttttttttaaatccattctgcccatctgtcttttgatagaagaatttaatctacttacatttaaagcaattaccaaggaggaacctctgacattttggtatttgttttctgtatgactcagagcttttttgtccctcatttcccgcattactgtctttttttctttctttcttttgtactaaaacattttaattcccttctgattttcttttgtatagattctataactgttttttgtatgtgtctagcatggggaatacatttaatatgttgaagttgtagcacaccaatttgaatttataccaacttaacttcagtaacatacaaactctgcttttttccagctttgtccttaatccctttatttagttattgatgttataaattacatttacattgtgtgtgtccaaaaacaagcagttcttctcagtgcattagcctcttaaattatgtagaaagcaaagagtagaattacaaatgattattgcaataatactaacttttataattatctatatattttcctttactgagtttttacttcctcatatagttttgagtgtcctttcattttaacccgaatgactttatttagcatttcttgcaaagcaggtctagtggtagtgaattctttcagcttttatctggaaatgtcttaatttctttcctacttttgaaaaacagttttgttaaacattagattcttggttgacactttttttcttttagcactttgaatatattagcccactcccttctgccctccaaagtttctgattagaaatctgctaataatcttattaagaatctcttgtatgtgctgaatcacttctttctcactgctttcaatattctctctttgtctttggctttcaacattttaattttaatgtgtcttagcatggggtctttttgattcatccaacttggcatttgttgagcttcttagatgtttatatctttcatcaaacttgggaagttttggcaattatttctttatataatctttctacccctctctctctcttcttcttttgaaactccacaatgtgtaagttggttcacttaatggtgttccacaggttgcttaggcttcgtttaatttttctcaatccttctttctgttcttcataattaataatttttattgttctgtcttcaagttcattgattctttactctgctgctcaaatcttccttggagtttgtctcatgaattttttttcacttcacttcttgtacttttcagctctagaatttcttttttttcctttttaggatttttctttattaatatttttattgttaatatgttattttcttgactttttgcatgtcttccttcagttctttgagcatctttgaaagaattgttttaaagtctttatctagtagttttgccatctggcctttctcagggatcgttttctgtctatttttttctttgactgagccatacttcccttttttttgtatgacttgtgacttttgttgaaaacaacgttattccttttaaagtttttaattttcatgagtacatgagacataggtgtacatgagatatttgatataggcatgcaatgcatacaaatcacatcagggtaaatagggtatccatcacctcaagcatttatcctttgtgttacaaataaagcaattataaatacttttagtttcctttaaatgtatataattattattgaacattaaattattatttaaccagatttttcaatttttttctaatagagtcgtttgagctccttatatattctgttattaatactttgtcacatagatagtttgcaaatattttctcccattctttgggttatctcttcacttcatggactgtttcctttgctgtggaggagtttttaacttgttatcctatttgtctatttttgctttggttgcctattcttgtggggtattactcaagaaatatttgcccagttgaatgtcctggagagtttccccaaaattttcctatagaacttttatagtttgaggtcttacatttaagactgtaatctattttgatttgaattttgtttattgtgagagattagggtctagttttattcttctgcatatagatatccagttttctcagcaccatttattgaagagactgttctttccccaatgtatgttcttggcagctttgttgaaaatgagttcactgtagatgtatggatttgtttgtgggttctctcttttgttccattggtctgtgtgtctatttttatgccagcaccatacagctttggttactatagctctgtaatataatttgaagtcaggtaatgtgattcctccagatttgctcttttggcttaggacagttttggctactctgggtattttgtggctccatatacatttaggattgtttttcctgtttctatgaagaatgtcattggtactttgataggaaatgaatcatatctgtaaattactttgagtagggtatagacattttaacagtattgattcctccaatacataaacattgactatttttccattttattgtgttctcttcaatttctttcatcaatgtaaaaactgaaaatttgaatctactaatatgataactatggaaatcagattctccttctatcccatcgtttgctgtttttaaattttgttttgttttgtttctgattggtgtgggctttcttcatactgaggattagcctagaaattgcgagccttcaatagactccagagttccaaaatagttacctcatgcaaattctgtcagtcagtgcaattgttgtctaggtagggaggcagattactggtgcttcctacttcaccttttattcattagcagtgttttaaattttatatacgtgaatacatcagtactgtcattttcatgtgcttcttaaacattgctttagaaatgtatccatattgttacttttagattcagtttattcacttcaagtcttgtattttctttcatgaatacatttctctcatggtaggttgttaattttgttgactttttgctattaaaaactgagatataatgaacacgatctctccttgcattttgtgtcaagtttctcagtgtagatacatacaagtggaaccattgatttgtttagttcacataccttcaaccttaccaactattgtcagtttgttctttaatattgttgtataggaacaagcaattagtgtcttatatactaactattgtattaatcttcttatttccctataaagttgacaacattaggtattatcagatactattgatttgtcaccagaaattcttaattattttattgcttaaaataattggtggttgctattgcaatgtctatctaaacaatcctgcaaacagggacaatttgacttcctcttttcctaattgaataccctttattttcttctcctgcctaattgccctggccagaacttccaacactatgttgaataggagtgctgagagagggcatccctgtcttgtgccagttttcaaagggagtgcttccggtttttgcccattcagtatgatattggctgtgggtttgtcatagatagctcttattattttgagatacgtcccatcaatatctaatttattgagagtttttagcatgaagtgttgttgaattttgtcaaaggccttttctgcatctattgagataatcatgtggttattgtctttggctctgtttatatgctggattacatttattgacttgcgtatattgaaccagccttgcatcccagggatgaagcccacttgatcatggtggataagctttttgatgtgctgctggattcagattgccagtattttattgagtatttttgcatcaatgttcatcaaggatattggtctaaaattctcttttttggttgtgtctctgcccggctttggtatcagaatgatgctggcttcataaaatgagttagggaggattccctctttttctattgattggaatagtttcagaaggaatggtaccaattcctccttgtacctctgatagaattcggctgtgaatacatctggtcctggaattttttggttggtaagctattgatgattgccacaatttcagatcctgttattggtctattcagagattcaacttcttcctggtttagtcttgggagagtgtatgtgtcgaggaatttatccatttcttctagattttcaattgtatatctagaaaaccccattgtctcagcccaaaatctccttaagctgataagcaacttcagcaaagtctcaggatacaaaatcaatgtacaaaaatcacaagcattcttatacacgaataacagacaaatagagagccaaatcatgagtgaactcccattcacaattgcttcaaagagaataaaagacctaggaatccaacttacaagggacatgaaggacttcttcaaggagaactacaaaccactgctcaatgaaataaaagaggatacaaacaaatggaagaacattccatgctcatgggtaggaagaatcaatatcgtgaaaatggccacactgcccaaggtaatttacagattcaatgccatccccatcaagctaccaatgactttcttcagagaattggaaaaaactactttaaagttcatatggaaccaaaaaagagcccgtatcgccaagtcaatcctaagccaaaagaacaaaacgggaggcatcacgctacctgacttcaaactatcctacaaggctacagtaaccaaaacagcatggtactggtaccaaaacagagatattgatcaacggaacagaacagagccctcagaaataacaccgcctatctacaactatctgatctttgacaaacctgagaaaaacaagcaatggggaaaggattccctattgaataaatggtgctggaaaaactggctagccatatgtagaaagctgaaactggatcccttccttacaccttatacaaaaattaattcaagatggattaaagacttaaacgttagacctaaaaccataaaaaccctagaagaaaacctaggcattaccattcaggacataggcatgggcaaggacttcatgtctaaaacaccaaaagcaatggcaacaaaagacaaaattgacaaatgggatctaattaaactaaagagcttctgcacagcaaaagaaactactatcagagtgaacaggcaacctacaaaatgggagaaaattttcgcaacctactcatctgacaaagggctaatatccagaatctacaatgaactccaacaaatttacaagaaaaaagcatacaaccccatcaaaaagtgggtgaaggatatgaacagacacttctcaaaagaagacatttatgcagccaacaaacacatgaaaaaatgctcatcatcactggccatcagagaaatgtaaatcaaaaccacaatgagataccatctcacaccagttagaatggcgatcattaaaaagtcaggaaatgacaggtgctggagaggatgtagagaaataggaacaattttacactgttggtgggactgtaaactagttcaacccttgtggaagtcagtgtggtgattcttcagggatctagaactagaaataccatttgacccagccatcccattactgggtatatacccaaaggactataaatcatgctgctataaagacacatgcacacgtatgtttattgcagcactattcacaaaagcaaagacttggaaccaacccaaatgtccaacaatgatagactggattaagaaaatgtggcacatatacaccatggaatactatgcagccataaaaaatgatgagttcatgtcctttgtagggacatggatgaaattggaaatcatcattctcagtaaactatcgcaagaacaaaaaaccaaacaccgcatattctcactcataggtgggaattgaacaatgcgaacacacggacacaggaaggggaacatcacactctggggactgttgcgaggtggggggacgggggagggatagcattaggagatatatctaatgctaaatgacgagttaatgggtgcagcacagcagcatggcacatgtatacatatgtaactaacctgcacattgtgcacatgtaccctaaaacttaaagtataataataataaaattaaattaaaaaaaaatcctgttgtcttcagtggagaacagtttgtttttttcaattcgtatgccaattttaaaaatttcatttcatttgcagggtactattgaatagaaacaatgatggcagacatctttatattttattaaatctgagagggaatgcctctttttcttgttttcatcattaaatatgatatttgttgcttttgatagaaaactcttacccagttatgaaaaatgtctctttttctagttggtgaaatatatgtgtgtgttttaaccatgaatagatttgaaatgatatcaaattattttctctatctactgaatatgacaagaatttttcttttttaatgtgttaaatatattgaattatattactagagattctcaatttgccacatgcttgtatacttgggataaactctacttggttttctgtattattttttcctaacatataattttgcttgataatttttaaaatttttcacctgtgtgttcataagattatactataattttcttgtcttatattatctttgtatgatagtttatgaacctcaacaaattaataggaggatttctcacttttttgttattttataacagtttgtataaaaagcaagagatacttacatgtgttaaaatctctcactgtgatcgtgaatttttcagctttctttgtagtcttataattgttttaatatttgctttacacattttgaggtaatgctaagtgcatataagtccaagactgttatattttcttggggagtttctcttttgtcattaagtaatgactattgtaattcttaataatactttttgccttaaaggctattttgttaatataagatactagctctctttggtttaaatatttttttatgtggtaggggtatctatcccttaccacttaaaaatctctttcaacggctctgtgttatggcttagtcatgatagcttatagcttaatttttttctttaattccatttaatataatagtcactgacttctcacttttactgcttttcactgccttttgggttttacggttattgtagaattgtttgtgttgacttcttgttatattccatctcagcagttctgactttccaaaataatggaaagaacatttttttataattttaagaaaaatatctgagagtgctacaatatcagatcagctcacatagattatgacttctgtaacccactgccatttccccatctacaatttaagccatgcatagtgtctactgtttagtaaaaagaaaaggaattgggaaattcctgtgatacaatttcttaacaagagtaatctcattggagttggaagaaggaaagaaataatgacaaaaagctgttctgcagtgccccagaagtccttaaacatggctggatttacaaaactgaagttgtcaccgttctgaggttcctcttttgtttccattcagattccacacattatttctcatatttgtatgctgtctatgtctatgcttcccatattactggatcattatagtattgggaataatttgttgtactagctatcttgattggtgtccctttctctcattggtgataactctaatgttaattaattttcttcccactggttgcaaatcatactattttgtgtcatcaaaattaaagaattttacttctatcttgttatatgaacaatattttaagaaacatctaagttttagatgtaaaactatggagatattatttatgagaaattagatattattttagaaattattttgtgcatttatatacttatggttggagacattaaattagtttggcctttctatcgaggctaatggtatacttctggttctttgtcagttagcatgctctaaatcagaggttggcaaactttttctataaaggccaactaataagtatcttaggctttatagcttatgcagttcctctcacgattactcagttttgccactgtaatgtgaaagcagccatcgacaatttataaactaatggatggctatgttccgatacaattttatttattaaaacaggtgattaactgaatttgactgatggaccataacttgctgcctcgtgctctaagtgatagcacatctacttaagaatttgacagtatgttaaagtgagcatatgcacagttcttattagaaaattaaatttaattctattttctactgcagcccctgaaaagataattacttgtttcaaggcatatttttcatctggtcttttgcatattatagggagaatccttttgaacatggaagagacagagtgtgtctatgacagcttgcaagcatatgtatgatacaagaacacaaagtcatttttaattaacaatgactttgtgttcttgtatcatacatatgcttgcaggctgttataaaagtcattcatagtaaatctgctatgtaataaatacaaaaattacttataagtaatgacatcgtataccgattgaacttagaaactgttggaactttttttttaaataattagtagttcatggtttttccttgtatatattgcagttcagtgacaaaccatggaatcctggagctgcccagaacaatttgatttttgcatttgtgaagcttcttaaacctcctgtggtttagttgacacatctcagatacacaagaatttaaacattgatctaagctgtgaaaacacgtcatagttacattatcttacagcagctgctgtgcaccaattcagcctaataaattcttaagtgtatttcattcatgcaacttggcctattgctttgtttggagtatccagtaattcctatagacatataataaagagaaactcagtacagtgtatagcatagcaagaaatgctcatatggggcttttcccaaaagaacaactagtgattgaaagcactaaactccctaaattagcatctccttctctttcaagctacttacaggtcctatattgcaccaagatattgtcactaatttcactttagcataatattgagataccaccttgatcatctgtgttgtttctatacaatgggccaaatgctctctgccatgctaccaggaaaaacaattagcaaacgaattttttgtaatttgctgggattgtcatagtaaacattttttatcttttaaagtgtcttcctagaacaagaaggttacgcagtgactttgtaaatttttagctatggtgttacactggagtctttgtaatgcaaactaggaaagatcaggatgcctgcttttcatagcaagattattcattcattaaaagttaaaacacattgtttgttttggggcggtggtgctggatgttattatttcccacatgcccacttcagcagtagagaactgaaacgtcactgctgggtagcatttctgaagtcattgtgcttggattatttccttcatatttctactactgcaaactccttgctcctaatttgttagtatcaaatgtatcgcaaattcacaggtttcaatatgaggagataatttaaaaatgtagatttgtacttttaaaattgggttcttctttcattcagtaaacattttctcaacattatctatataccaacaatagtggtaggccctggggttgtgaagattaataaaacatagtcattttccttgagaaggtcttaaatagaatggaaaagacatacaaatgaatggttacaatactatacgatattcataacaaaagtaatgaacaaagtgctgtgagaagactgagggaaagatcaaagagtgactggaagacttccctgtttaatgtatgctgcaagacagtgagcaacaatgaaacaatgtattttgaatgctgaaaatgaacagtttgaaaatagaaataaaataaaaataccatttaaaataatatcaaaacccatgaatgattacaaataaaccttaaagaagagtataagaactatacccctttgtactatgtgagtaaatacaaagtaactttttggtaatttctttcaaatataattgcctctttaaagcacaactaatagcaatgttttatgaggtctataatgtgtgtataagtaaaatatgtaacacaatagctcaaaggattggagaggaaaatggaagtatactattgtaagtttcttaaactatatgtgaagcagaatattatttgaagctggattattataaattaaaaatgtagggtgttaactctagaacaatcactaaaaaaagaagaagaaaaagacgatttaaagcttcacaaagaatatataggagaatatctctgtgaacctggggataggcacaaagccaaaaacaagctaatcataaaaggaaaataaataaaaaaataaattcataaaattaaaaatactactaatttaaaaataacattaataagctgaatatgcgagctgaaggctgagagaaaatatttgtaatgcgtgtctctaacagaagacttttatctggaatagataaagcatttctataatttgtaatataaagataaagccttctctccatccacagtccactatccattgagcaaaagacttggaaaagcacttcaccaaggaagataaataaatggccaataacatataaaaatttctcaaaatttttagtcagcattatatttttaaacactccctaaaatgattaaaatttagaaaactgattacatcaaatgttggcagggatgtgaagcaactgaattttcttacattgctgcaggagattgaaaatggttctggcagcttttaaaaagttaaacatattccttcaacctaagtgtttatcagcagaagaatggataaataaactgtggtacatacatatacacaatggaatattgttaaagcataaaagagaatgagatcctgtcatttacaacaacatggacagaactggaggacgttatgtgaagggaaataagccaagcatgaaaagacaaatgttgcatgttctcactcatatgtgggaactaaagaaattgatctcatggagatagagtagaatgatgattaccaaaggctgggaagggtagtggagagaaaggagtaaagagggaatagttaatgggtactgaaatataatcagattgaagcaataagatttagtgttcagtaggatgattctagttgacaataatttattgtatattttaaaataactaaaagagtggaattagaatgttcctaacacaaagaaattataaatgcttgaggtgatggatatctcaattaccctgatttagtcattacacattgtatgcttgtattaaaatttcacatgtaccccataaatatgtatagctgtcatgtatccataaaaattagatattaaaaaattacacatattattcctcaatccaataatttcttctctacgcattttccctaagagaaatgaaaacatacttatacaaaaagacacgttcataaatgatcatagcagcattattataatatctaaaaaatagacacatctcaactatccaaatgcagaatcaattaacaagctatggtacatttttgtcagcaatggaaagggacaattactgataaatacagtaacgtggatgaatactaaagacattttgctgagcaaaaagagcccaataaaacagaatacatactgtgtaatttcatttacattagttctgggagaataactaatttataatgaaagaagttagaacactgtttggagggtgaggagtattttccaaaaaaggcacatggggttttcagactattctctgttcattgaaatgtgtgtttcagggatatatgcatttttcaaaattcatccacctgtacgcttaagaatggttcattttgctgtgtaaattagacttgaatcaaaactattttgttaaaaaattaaaacattaacaaagtagtggttactgtctggcaaaaattatacataaaatccctggacacgcaataaaataacatcacaggttaaaatttacagagtaaattgctccttttgttttgttttttacttactgattatagttagtatttttttcctatagagaatttattttcaaatataacaaaaaatctaaaatgggaaaagttctataatttattaattcagtagtttaatggttccttttatcttcctgctttacaaacctcagcatttctcctcaagagtatttcctattagtggctattatgagtgtttggtacatcataccaaacgtgcatacacatccatgcatacacaaggcccagcagaacactgaaggaccactaattccttgtgtcacttgaccttttttctgtaaaatatttcagacatatccaataatatatgtttcatatgcttaaataatgtttgatatgtttcatagggtttaaataatgtaacaaacatgtgtgaaccccactgcccagcttcaagaagtagacatagctaatgtctttgaagctccctgcacgccccttcccagtggcactcctcatctccccaggataattatctcatctcttggattttgctttttttattcctttgctttcaaaaaacagttttatcatactaaagcaatattcttaaataagatattgtttagttgtgcatattttcaaaatttcataaatggattaagtataacataacaaaaaaaagagatgttgtcatatttgatacttgtttcactattcaactatttcattgctatatggtattccactaaaggaaaataccacaatttatttattcattgttctttctatgaatatttgtttttttccagagttcatttttattatttattgcactattataaaaatattctaatgaattttcttgtacatgtatactggtataaaaacataagagtttctctaggaatatgtgtagatgtggaattattgtgttgtaggctatgcacaagtttactaaataatggcattttccctctaaatttagttgttccaattgccacacctattagtaatgtacaaatattcaaatcaacctccttccaaatactgaatatgtattatactcttcagcttttgacaatttgaaggatataaaatagtatcccaatatgattttaaggtacgcatatatttgtgagtgctcgtatatttcttttttcatgaaattcttcaattttttgggttttatttatatattggtcctttgtcttttcttcttgatttttaaggagctttttatagattctcaataaatttttcactgtttatatgtattttgatttttatttcaaacatgtggactactttttatactaattatcacatattttaatacacagattattaattttaatatagtttattttattaatatatttttcaaagcttagcatatatattatttatgacttatttcacagaaacagtcaaccatattttcttctatattatttaaagtttggcctttcctgaaatttctgatctgtctggaattattttttgtgtacaacgtgaggtaggaattgttgagaacgctggagagtctgagatgttaccttacttgcaagttcataaattagcctttgacagttttatgaatattggcagaagatacaagactcctgggtcagatacgagggtctttattactcagagcaatagcagcagttagaatgtcagaactcatgtcagttcctcgggccccagttcccataggatgatgtaatgttcaggtgacctcagcacacacagttgcattactgaagagaaacctcaagctaagggaacccaaatcttttgtaatgggcaggaatcatgcctgacctttgccccagagagcccgccccatagtcattagatctacccttttctccagaaggagacactacctctatctttcaaggctgtctgctatataatcatccttagcaagatggtctggaacaaactagtgtttctgtttgcaaaacatgcggaaatatgagagggccatagagaattgccttccaacaggaatctagtttctccccatccccatacaatgactaattggggtggatcagcatgatttaatgcatagtttcttctttcctcagatgtctgcagtgcttaccttgacataatcaggttcccatgtatgtctgtgtctgttctgggctctgtattctattaattcatagtctatcatgacatcaatgcaacatatttttacttatcacacctttataatagttcttgatctctggcagaatacttcccttgccggcgctaggcaaacagccacttgttcttcttcaggaatgtcttatatattcttatcctttcagtcttccttaaatttaaaaaacctgcagaagttccaatgcaaaacatttttccttgcaattcagaccttccctctcagattattttgcttcctcctacagtttattgaaaacttcctatagtaagctttatgcagtgtctccagtatgacttcccactgtagataggtctaaatcttgtttcctgtactctgcatgctacattttaagaactgaagttctgagtggctggcaagatggctggcaaattgtctgtgtttgcagatgacatgattctacatttagaaaaccccattgtctcagccccaaatctccttaagctgataagcaatttgagcaaagtctcaggatgcaaaattaatgtgcaaaaatcacaagcattcctatacaccaatagtagacagagagccaaatcatgagtgaactcccattcacaactgctacaaagagaacaaaatacctaggaagacaacttacaagggatatgaaggaccttgaagagcaaggagaactatgagccactgctcaaggaaataagagaggacacaaacaaatggaaaaacattccatgctcatggataggaagaatcaatattgtgaaaatggccatactgcccaaagtaatttatagatcaatgctatcctcatcaagctaccattgactttcttcacagaattagaaaaaactactttaaatttcatatggaaccaaaaaagagcccatatagccaagacaatcctaagcaaaaagaacaatgctggaggcatcatgctacatgatttcaaactatactacaaggctacagtaaccaaaacagcatggtgctggtaccaaaacaaatatatagaccaatggaacagatcagaggcctcagaaataatgccacacatctacaaccatctgattttcgacaaacctgccaaaaacaagccatgaggaaaggattccctatttaataaatggtgttaggaaaactggctagccatatgcagaaaactgaaactggaccccttccttacaccttctacaaaaattagctcgagatggattaccgacttaaacatgagacctgaaaccataaaaactctagaagaaaacctaggcaataccattcaggacataggcatgggcaaagacttcatgactaaaacaccaaaaagcaatagcaacaaaagccaaaactgacaaatgggatctaattaaagagcttctgcacagcaaaagtaactaccatcagagtgaacaggcaacctacagaatgggagaaagtttttgcaatgtatccatctgacaaagggctaatatccagaatctataaagaacttaaacaaatttacaagaaaaaagcttacaaccccatcaaaaagtgggtgaaggatatgaacagacacttctcaaaagaagtcatttatgcagccaacaaacatgaaaaaaagctcatcactagtcattagagaaatgcaaatcaaaactgcaataagataacatctcatgccagttagaatgaccatcattaaaaagtcaggaaacaaagatgctggagaggatgtggagaaataggaatgcttttacaatgttggtgggagtgtaaattagtgcaaccattgtggaagacagtgtggcaattcctcaaggatctagaaccagaaataccatttgacccagcaatcccattactgggtatatatccaaaggattataaatcattcttctataaagacatatgcacacttatgtttattgcagcactgttcacaatagcaaagacttgcaaccaacccaaatgctcatcagtgatagactagatgaagaaaatatgacacatatacaccatgcaatactatgcatccgtaaagaggatgagttcatgtcctttgcaggggcatggatgaagctggaaaccatcattctcagcaaactaacacaggaaccgaaaaccaaacactgcatgttctcactcataagtgggagctgaacaatgagaacacatggacacagggaggggaacatcacacacaggggcctgtcagggtgggggcctaggggagggatagcattcagagaaatacctaatgtagatgatgggttgatgggtgcagcaaaccaccatggcacatgtatacctatgtaacaaacctgcatgttctgcacatgtatcccagtacttaaagtataataaaaaaatacaaataaaaaaagaagtaaagttctagtcatcagacatcagcagacggcctgtgacaaacagcggcctcagctcatttacttctctgcatgtattctttcacattgttttcaacttctcagaacttttcatgcctttatttttgaccactcagctatgcattctgaaagatgttttgtgtattttatgttaacatttttagggattttgcactgatagtgattttcaggacatctatcaatccttgccagaaatggaagtcgcatattgatggtgtttttaaatggtttaatctgacagtattgtgcgttttgcacacaatcagcattcaacaaagtgtgtttaattgaactcaaaacaatttatttgggtttctctgatgttgctgtgtcattctcaaataacttagtacctaatttggcattactaccattagataacttttcctcttaaaactgtgcaaacttatagaatattttgaacatacagaaaatgatataattgaatttttgtacttcccaccaagattaaacttatgttaatatggtgcctaatactttttactccacaattatatttacttaaaagcaatatataatcatttttgtatattttgtaattttaaaatttcacacaaatatagtatattccttatatctgttacaaactgcttttcttctcggtcaatatcatgtttgaaaaatttatctattactgatacagtaagctctaatataattactccaagtcctatatagaattctattataaattatattttatttaatagtgcttttattctacaataaatatatatatcctgttgagcatatgtttgagagtttttttttgtaaattaaatgttaagaactgaaaatgctttataacaggatgtatttccctttaaattattaggtatgtccactttcttatatctaatctttatgagtgtgatggaattgatcattataaaagataggacattttaaccttatttcattattaaatacaatttgtgaaaggtatagtacaggtcaagataaggattatgttggagatatgttgtgcatggtactttgcatataactcaaattatgccaaaatctatattgttatataatgaaaaactagtgatttgaaaatttatgctccatttctttttcctctaggtatttatgagcctccatttcttatactactgcagtgaaccaacattggatgtgaaaattgccttttgtcaggtgtgtgttccttacaggtaaaacaaggtacagtatattcccttgtatttccactttgacataccatttgcatacattccacaccaaagtcagtatttatatcatattaacagtagtttagaattaggagctggcaagacggctgaatagaaacagccccagtctccagctcccagcaagatcaacgcagaagacgagtgatttctgcatttccacgtgaggtacctggttcatctcactgggaaaggttagagagtgggtgcagcccacagagggtgagctgaagcagggtggggtgtcgcctcacccaggaagtgcaaggggtcagggaactccctctcctagccaagggaagccatgaggaactgtgccatgaggaatggtgcactctggcgcagatgctacactttttcgatggtcttcgcaacctgcaggttccctcaggtgtctacaccgcaagggtcctgggtttcaagcacaaaatgggcggccgtttgggcagacaccaagctagctacaagagattcttttcataccccagtggtgcctggaacaccagcgagacagaaccattcaccccccctggaaagggggctgaagccagggagccaagtggtctagcttaggggatcccacccccatggagcccagcaagctaagatccactggcttgaaaattctcactgacagcacagcagtatgaagtcgacctgggatgctcaagcttggttggggggaggggcgtctgccattactgaggcttgagtagacggttttcccctcacagtgtaaacaaagatgctggaaagttcgaactgggcagaggccaccacagctcagcaaagccagtgtagccagactgcctctctagattctgcctgtctgggcagggcatctctgaaagaaaggcagcagccttagtcagcgacttatagatgaaactcctatctccctgggacagagtacctgggtgaaggggcagctgtgggcacagcttcagcagacttaaatgttcctgcctgccagctctgaagggagcagcagatctcccagcacagcaatcaagctctgctaagggacagactatctcctcaagtgggtccctgaccccacacctcccagcaagggtcgacagacacctcatacaggagagctccagctggcatctggcaggtgcccctctgaaaaaagcttccagaggaaggaacagatgcaatctttgctattctgcagtctctgctggtgttactcaggcaaacaggatctggagtggacccccagcaaactccagcagagctgcagcagaggggcctgttagaaggaaaactaacaaacagaaaggaatagcatcaacatcaacaaaaaggacattcacacaaaaaccccatctgaaggtcatcagcatcaaaaaccaaaggtagataaatccacaaagatgaggaaaaaccagcacaaaaaggctgaaaattccaaaagccagaatgcctcttctcctccaaaggatcacaactcctcgccagcaagggaacaaagctggatggagaatgagtttgacgaattgacagaagtaggcttcagaaggtgggtaaaaacaaactcccccaagctaaaggagcatgttctaactcaatgcaaggaagttaagaaccttgaaaaaaggttaaaggaattcctaactagaataaccagtttagagaagaacataaatgacctgatggagctgaaacacacagcgtgagaacttcgtgaagcatacacaagtatcaatagccaaatccatcaagcggaagaaaggatatcagagattgaagatcaacttaatgaaataaagtgtgaagacaagattagagaaaaaagaatgaaaaagaatgaacaaagcctccaagaaatataggactatgtgaaaagaccaaacctatgtttgattgatgtacctgaaagtaacagggagaatggaaccaagttgaaaaacactctttaggatattatccaggagaacttccccaacctagcaagagaggccaacattcatatccaggaaatacagaaaacaccacaaagatactccttgagaagaccaaccccaagatatataatcatcaggttcaccaaggttaaaatgaaggaaaaaatggtaagggcagccagagagaaaggttgggttacccataaagggaagccgatcagactaacagcaaatatctctgcagaaaccctacaagccagaagagagtggggggcaatattcgacattcttaaagaaaagaattttcaacccagaatttcatatccagccaaattaagcttcataagtgaaggagaaataaaattctttacagacaagcaaatgctgagagattctgtcaccaccaggcctgccttacaagagctcctgaagggagcactaaatacggaaaggaacagttggtaccagccactgaaaaaacatcccaaattgtaaagaccatcgacactatgaagaaactgcatcaactaatgggcaaaataaccagctgacatcataatgacaggatcaaattcacacataacaatattaaccttaaaggtaaatgggctaaatgccccaatcaaaagacacagactggcaaattggattgagttaaaattggatagagtcaagacccgtcggtgtgctgtattcaggatacccatctcacatgcaaagacacatataggctcaaaataatgggatggaggaatagttactaaacaaatggaaagcaaaaaaaaaaaaaaaaaaaaaaaaaaaaaaaaaaaaaaagcacgggttgtaatcctagtctctgataaagatcaaaaaagacaaagaaaggcattacataaaggtaaaggggtcaatgcaacaagaagagctaactctcttaaatttatatgcacccaatacaggagcacctggattcataaggcaagttcttagagacctacaaggagacttagactctcacacaataatagtgggagaatttaacaccccattgtcaatattagacagatcaacgaggcagaaaattaacaaggatattcaggacttgaatgcagctctggaccaagtggacctaatagacatctacagaactttctaccccaaatcagcagaatatacattcttctcaacaccacatagcatttattctaaaattgaccacataattggaagtaaaacactcctcagcaaatgcaaaagaatggaaatcataacaaacagtctttcagaccacagtgcaatgaaattagaatgcaggatttaaaaacttactcaaaaccacagaactacatagatactgaacaacctgctcctaaatgactactgggtaaataacaaaattaaggcagaaataaatcagttatttgaaattgaggagaacaaagacacaatataccagaatctctgggagacagctaaagcagtggttagagggaaatttatagcactaaatgcccacaggagaaagtgaaaaagatctaaaatcaacatcctaacataataattaaaagaactagagaagcaagagtaaacaatttcaaaagatagcagaggacaagaaataactaagatcagagcagaactgaaggatagatacacaaaaaacccttcaaaaaatcacagaatccaggagctggtttttttgaaaaggttaacaaaatagatagactgctagccagactaataaagaggaaaagaaagaagaatcaaatagacacaataaaaaatgaagaaggggatatcaccactgatcccacagaaatacagactaccgtcagagaatactataaacacctctatgcaaataaacttgaaaatctagaaaaaatggttaaattcctggacacatacaccctcccaagactaaaccaggaagaagttaaatccctgaatagaccaataacaagtgctgaaattgaggcagtaattaatagcctaccaaccaaaaaaagcccaggaccagacagattcacagctgaattctactggaggtacagaagagctggtatcattccttctgaaactattccagacaatagaaaaagagggactccttccttactcattttatgaggccagcatcatactgataccaaaacctggcagagacacagcgtaaaaagaaaatttcagggcagtatccctgatgaacatcaatgtaaaaatcctcaataaaatactgacaaaccaaatccagcagcacatcaaaaagcttatctaccttgaccaagttggcttcatccctgggatgcaagggtgtttcagcatatgcaaatcaataaatgtaatccatcacagaaacagaaccaatgacaaaaaccacatgtttatctcaatagatgcagaaaaggccttcgataaaattcaacacccattcatgctaaaaactctcaataaactaggcactgatggaacgtatctcaaaataataagagctatttatgacagttccacagccagtatcatactgaatgggaaaagctggaataattcccttagaaaaccagcagaagacaaggtgccctctctcaccactcctattcaacagagtattggaagttctgactggggcaatcaggcaagagaatgaaataaagcgtattcaaataagaagagaagaagtcaaattttctctgtttgcagatgacatgattgtatatttagaaaacctcatcatctcagtccaaaatctccttaatctgataagcaacttcagcaaagtctcaagatacaaagtcaatttgcaaatatcacaagcatttctatataccaataatagacaaacagagagccaaatcatgagtgaactcccattcacaactgctacaaagagaataaaatacctaggaatacaattaaaagggatgcgaatgacctcttcaaggagaactacaaaacatggctgaaggaaataagagaggacacaaataaatggaaaaacaaaacataccatgctcatggataggaagaatcaatattgtgaaaatggccatactgcctaaagtaatttatagattcaatgctattcccatcaaactacctttgacattcttcacagaattagaaaaaactactttaaatttcatatggaaccaaaaaagagcccataaagccaagacaatcctaagcaaaaagaacaacactggaggcatcatgctacctgacttcaaactatattacaaggctacagtaaccaaaacagcatggtgctggtaccaaaacaaatacatagaccaatggaacagaacagaggcctcagaaataatgccccaaatctacaaccatctgatcttcaacaaaaataagccatggggaaaggattccctatttaataaatggtgttgggaaaactggctagccatatgcagaaaactgaaactggaccctttccttacaccttatacaaagattaactcaagatggattaaagacttaaacgtaagacctaaaaccataaaaaccgtaaaaaccgtggaagaaaacctaggtaatatcattcaggacataggcatgggcaaagacttcatgactaaaacaccaaaagcaatggcaacaaaagccaaaattgacaaatgggatctagttaaactaaagagcttctgcacagcaaaagaaattattaccagagtgaacaggcaacccacagaatgggggaacatttttgcaatgtatccatctgacaaagggctaaagtccagaatctataaagaacttaaatttatgagaaaataacaaacaaccccatcaaaaaatgggcaaatgatatgaacagtcacttctcaaaagaagacatttatgcagacaacaaacatatgaaaaaaagctcttcatcactggtcattggagaaatgcaaatcaaaaccacaatgagataacatctcatgccagttagaatggtgagcattaaaaagtcaggaaacaacagatgctggagaggatgtggaggaataggaaagcttttacactgttggtgggagtgtaaattagttcaaccattgtggaagacagtgtggtgattcctcaaggatctagaaccagaaacaccatttgacccagcaatcccattactgggtatatatccaaaggattctaatcattcaactataaagacaaatgcacaggtatgtttatagtggcactgttcacaatagcaagacttgcaaccaaaccaaatgcccatcagtaatagactagataaagaaaatatgccacatacacaccatggaatactacgcagccataaaaaggatgagttcatgtcctttgcagggacatggatgaagctggaaaccatcattcttagcaaactaacaggaacagaaagccaaacatcccatgttctcactcacatgtgggagctgaacaatgagaacacatgggcacagggaggggaacatcacacaccagggcatgtcgagagggatagaattaggagaaacacctaatgtagatgacagattgatgggtgcagcaaaccaccatggcacatgtatacctatgtaacaaaccttcatgttctgcacatgtatcgcagaacttaaagtataagtttttaaaaaagtagtttaggaaatggaagtgaataggtgtttagtttctaattcatttaagttagaatgggaataaaggtaattttttcaagttttattataaagtgatttcttctttgattatatttacacttaaagattttagtatttcttttcaaatccttgaaatgggtctttaaccataaaaatagtttcattctttacagtagtccccccttatctgtggtttcggtttccacagtttcagtcacctactgttaactgtggtcctcaaaatattaaattgaaaattccagaaataacaactcatgagttttagattgcacgctgttctgagtagtgtgaagaaatcttgtgccatcttgctccatcccacttaggttgtgcagcacgtccatataatgccacctgccagtgaattacgtaacaaccatctctgttatcagattgactgttgtggtatcacagtgctcgtgttcaagtaacttttattttacttaattgttctattttatattagttattgttgttaatatcttactgtgcctaacttataaattaaactttatcataggtatatatgtatagggttcagtgctatctgtggtttcaggcatccactgggggtcttaaaatgtattctctgaatataaggggagactactgtattattatttctcatcatacgaactgattagcctgaaatagagtatctctaaacccactataataatatacaggtggtagtcagttttttttctgatgcctaattctaaccagtacttataatagtaaaaatgttaaccaacaataatgacaaacaatggtatacttaacctagaagggaaagtaagaaggtggcaacaacgtttgttagtgtgcatggactagataagagttgacttctttgtattcatgcaaaccctatctttaaggagaaggctccctagggcacctacataaacttcaagtatttttaaaacagttctaacttaaccctgttgtcatatataattgacagtgctttcttttactctcaagaattgttctagttttggcaaaaaattgtatgttaccttattcatacttaagcagagagcttcccttcagtttttcagcatgattatcattgcaccttctctttgagctgtgttttaaataaagaatgacatgaatcattgaaacaagatttttaaaataactcttttgctttattttaatgcaatctttcctgattctagaattaatatttgcttattatagaaaatatagaaaagcataaaaggaaacaaaacattgtttttgcatatgctttctgtaactactgtatgtactttccttgagcatagattttctatgagaaagtaaaatgtgttgcctgcaatgaataagatttactgatctctctcatctccctaaactgtaattgttgcagtttctgaagtctcaggccattagacaacttctctaataagaactccagtgctagacagccttggttagaaattccatttctatcccttattagccatttacttgtgaccttgggcaagttacttgatctctatgtgcttcagtttctttatttataaaaggaggaaataataatacctatattttaggcttgttatgagaattaaatgagtttatacttgcaaagcactgagagcagtactggcacatgtgtttgttaaatagatgattaaattttaaataaatttatactcactttctagtgctcccactgagtcccagtgctttaaatattatcattatcatgaatatcacacagttttatctccaacccaaacattttcctggaactggactcatattcaactgtctgttctacatctccacttagatgtcaaataggcatatcagactgtacgcattccaaagcaacacctcatctatcctctaaaattactcttcccattgtctactccagttcagtaactgataacttcactcttccacttataataaaatccttggaatcatcttttgggtcacactccatattcaagctgtcagcaaattctgttgactctataattaaaacataactggaatctcactgattctcactatttctccactaccaccctgaaagatacccttatctcttgcttaaattattgtaagagcttctacttttgcccacccccaagtggtttactcttaaaacattagaaagaattgtctttgaaaaataattgagatcatgtcactccttgactaaaactaaaacaaaagagaaagacctttcaatgtcttcctatctcactcagcaaaaattaaaatccttataataaatccccaagcctttattatctagccccctagaaacctctatcctaaaatgttcttctgttatccacttgggccactccttaaccatcttcagggcttcactgaaatgtcatttttaagcaaatctttcctgacaatccttttaaaaatagtcctaactacctgactgcatacccaacttccttgcctccataatacatcagtatctaacgttctatatatgttgctggtctggaattttgctcctctctctccacttgaatgcattttgcacatgaaccagatttttttcagtgtcctgctggggccagttcacacaggctcacaagagctgaatatgcacaactttccaactcaaagtttaacgatgccaagttggtaacttaaaatctgtcatgatcggagtatttatgttacagaaatgtgcaaatactgcaaataggcccctttcccattatttctcctccccagccagttgttgaacatttaccagcacaccattggaatcgtctcctgttcactgctgtactgcagaactcacaatagtatctgacatagggtcggtgtattaggcagttcttgtgatgctataaagaaatacttgaggctgggtaatttatagagaaaagaggtttaactggctcatggttctgcgacagtacaagaaatgtggcacaggcatctgcttctggttcaggaagcttacaattatggtagaaagcaagggaggagcaggcatctcacacggccagcgtgggagcaagagagaaagcagggaaggtgccacacacttctaagcaaccagatctcataagaactcactcactgtagtgaggacaacaccaagccacaagggatccatctccatgacccaaacacctcccaccaggccccacctgcagcactgaggattacattttaacatgagatttgaaggggacaaatatccaaaccatatcagtaggctctcatcaaacatctgcagaatgaataaatgaatcatacatgttttgcttatgtaatcagtagcaacagtgatcctgctgtggtgtaaaatgagtaggcctgaatttttaggttaaatatctgggccctagcacttgcaagctgtatgactgtgagctatttccttagccttcattatcctagccatttacttgccattaacacttaaaaaacataccaaccgacataaaaccataaaaaccctagaagaaaacctaggcaataccattcaagacataggcatgggcaaggacttcatgtctaaaacaccaaaagcaatggcaacaaaagacaaaattgacaaatgagatctaattaaactaaagagcttctgcacagcaaaagaaactaccatcagagtgaacaggcaacctacagaatgggagaaaatttttgcaatctactcatctgacaaagggctaatatccagaatctacaatgaactcaaacaaatttacaagaaaaatacaaacaaccccatcaaaaagtgggcaaaggacatgaacagacacttctcaaaagaagacatttatgcagccaaaagacacatgaaaaaatgctcatcatctctggccatcagagaaatgcaaatcaaaaccacaatgagatactgtctcacaccagttagaatggcgatcattaaaaagtcaggaaacaacaggtgctggagaggatgtggagaaataggaacacttttacactgttgatgggattgtaaactagttcagccattgtggaagtcagtgtggcgattcctcagggatctagaactagaaataccatttgacccagtcatcccattactgggtatatacccaaaggattacaaatcatgccactataaagacacatgcacacgtatgtttattgcggcactattcacaatagcaaagacttggaaccaacccaaatgtccaacaatgatagactggattaagaaaatgtggcacatatacaccatggaatactatgcagccataaaaaatgatgagttcatgtcctttgtagggacatggatgaagctggaagccatcattctcagcaaactatcgcaaggacaaaaaaccaaacactgcatgttctcactcatagatgggaactgaacaatgagaacacatgtacacaggaaggggaacatcacacactggggactgttgtggggtagggggaggggggagggatagcatttggaaatatacctaatgttaaatgacgagttactgagtgcagcacaccaacatggcacatgtatacatatgtaactaacctgcacaatgtgcacatgtaccctaaaacttaaagtataataataataaaaaaaaaccagccaaaactaaaatctaagttaatgttttacatatttcaagactaaatctgaaactcaaaaacaattatcaattaacatagcctaaaaatttcagccattttttaaaatacagaaagtctttgtgtagggtgtcgttatttttcagttcaactttctacatttgggtgtagatacagaatgtttatttttaatgagagttcttttaaagcaaaggaataaaaagaagtgaagcatgaactttcttaatgactggattttcttgcttattatgagcttttaatacacagaaaatatgcatgcatataacgtttttaaaaaatctagaaatagcatagtaaaaatatttccatttgtgactggacattttatttacttcctatgtagaattttctctgataaaaacacttatttttatttttcttataactctgtgcctcattcacttctctagcaatttaaagaaaacagtgtatttatttttagaggcagaatgatgtattggggttttctttctaactatgttccttggaagcttctcatttcctggggcatctcacagatcctttatgtgctatggtgtttaagcttatcaccagcttggctaaggctactctcaactttttgcccaacagacaatactcaaagatcttaaaaaacttgtcaataattaattaatgattaactgtgtccagaattccagtctcttgagccttagtccatggggttttcaattatgtcatatttctaagcttttcactattgtctgcaagaaatcagagaaatacggaaaatgaaattgctgaatagtatttgttaacagaaaataggtacattatctttaatagtttttaccttaattcttaactcaattatttgaagaatatgggattcactgacttttttgaagaagttactcttattattttttttaacccaaccaagtagcttttgaaggcaagaggcttcttgttatagtctcgggagaaatttttctttgtaatgttggacaataaaagaataatctttagtttgcactggtattaattcaataattacaaaaatataaacctacagggaatataaagtgaaaaattcttgattctcctgagcaataggtaagtagtcttagccctcttttctcaattgaacagaggtacagaactgttacatttcactctatgaatttaaaaaactcatgaaagtgttctttttggaactttgttgtactgaacagattattcaggattttaaccaggagatatattcacagagaaataatatgtgttgtggctccccaactcctacacactctctggtgtctacagcacttaccgcattctttgtgcattactactaagtttacagatttgttttccccattcagtggtactatctcagggtcaggaccagggcatcttcctccttaactcccaggcccagaagtttatcttactacagaaaatattcaatgaaagagggaaaatgaaaacccagcagaaaaacaccatttcctaagtagaaatgtgtttgcttgcttttcaaaatcaaatcaatttttcaacatcctcatatcctacaagtgtatgttaatagatttaattatgttttcattattttcctaatcataaatcagtatttacctaacatttatctaacatttatcaacttagtgtcctctgtaaacatttaccgatgatttagttatgaataattttaaattatttcctgattttgagaaagcctgtgacacagagggtacaaattaattaatcatcaaatcataaatttaagcagcactagaagtaaaagggactgagctaagactggtcttcctttttcttatgacacaaaaactccttttggctccttatctactcgttgactgattgattattgattttaccattcatcgattcaatacatatttttaagagtttttggtaatttttctaatttattagtttaatatccatcccatttaaaaatttaatttacttaaaaaaattggcacataacaatcatacatgtttatggaggtacatagtgatgttttgatacatataatgtatagtaatcacatcagggtgattaacatatccatcatctcaaacatttatcacttctttgttttgagaacattcaatatcctccttctaactatttgaaatttataatataaactatagtcaccctacagtgctgtagaacaccgtattttattcttcctgtctagctctaattttataccctttaacaatctcttttttcccccaacccttacccatctcagcctccagtatcctctgttctactttttatttctatgagatcaactttttttagcttccatatatgaatgagaacatgtggtgtttaacttcctgttcttctcttatttcacttaacataatgtcttccagttccattcatggtgctgagaatgacaggatttcatttctcttttatggctcagtagtattccattgagtgtatatacctaatttgctttatctagtcatgtgttgttggacacctaaggttgattccatgtcttggctattgtgaatagtgcagtaaacatgggggtgcagatatctctttgatacactagttttcttttttcttcttcttttttttttttttgatgaacacccagtagtgggattgctggatcatatggtagttctatctgtagttttttgaagaagctatatactgttctccatagtgcttgtactagtttacattcccaccaacagtgtataagagcttccttttctccatatctcaccaacatttattattttttgtcctttttataatagtcattctaaccggggtagaataacacatcaatgtggttttgatttgtagttttctgatgattagtgatgttgagtgatcttttcatatattttttggccattcgtgtgtcttcttttgagacatgtctgttcagatcatttgtttattttataatccagattttgttgttgttattgagatatttgagctccttgtatatttaggatattaattccctttggaatcaatagtttgaaaatattttctcccattctttgggttgtattttcactttgctgattgtttcctttgctgtgcaaaagctttttagtttgatacaatccatttttttttgttttgttgcctctgcttttgaggtcttattttcataaaatctttgcccagaacagtgttccaaagcatattccctatgtcttcttctagtagttttatagttttaggtcttacatttaagtatttcatctatcttgagttgtattttgtttattgtgagagatatagtttcattcttcttcatatggataaccatttagcatcatttattgaagagagtttcccttccccaatgtatgttcttggtagctttgtcaaaaggtagttggcgtagatatgtaaattaatttctgggttttctgatttgttctgttggcctatgtgtctgtttttatgccagtgccatgctgttttggttactatagccttgtagtatattttgaagtctggtggcgtaatatctttagctttgttctttttgttaaggattgctttggctatttggggccttttgtggttccatacaaatttttggattttttttcctgggaagaatgtcgttggtattttggtaggcgttacattgaatgtgtaggttgctttggttagtatggtcatttaacaatattaattcttctgatccataagcatgagatatcttttcatttgtatcctttttaatttctttcatcggtgttttatagttttccttgtataagtctttcacctccttggttaaatttattcctaggtattttattgtttgtgtactattgtaaatggaattgacttcttgatttcttttcttttctttctttttttatttttatttttgagatggagtcactttgtcacccaggctggagtgcagtggtacgatcttggctcactgcaacctccacttcccaggttcaagtgattctcctgcctcagtatcccaagtagctgggactacaggtgctgaccaccatgcctggctaattctttgtatttttagtagagacaaggtttcatcatgttagccaggatggtctcaatctcctgaccttgtgatgtgcccaccttggcctcccaaagtgctgggattataagcatgagccaccacacccagcaaacttcttgatttcttttttagctagtttgttgttcgtgtgtagaaatgttactgatttttgtttgttgattttgcattctgcaattttattgaatttgttttgttacttctaagggttttttagtagagtctttaggtttttctatatatgagttcatgccatctgcaaacagggacaacttgacttcttcctttctactttggatgccctttacttatttctaatgtctaattgctttgaccagttcttccagtactatgttgaataatagtggaaagagtgggctgtcttgttccacttcttagaggaaaagctttaaggttttccctattcagtatgatgttagctatgggtttatcataaatggcctttgttgcaagacatcttactgagtacctataaaatgtacttgtaatttgtgtaatataaactagagatacagcatgatgtggttactctcctaaaaaacatgctgtttactctcaatcatggtagggagtagttaggcttataaacattaaaaaaaccctactccttagagttcaagacctcagagataagcaataatgagtcaccaaacatccaaccaaccaaaacccctcactacctattgaatacttactgtgtgtgaaaaatttattaatattttacctcattttatctttataataccacttaaactacatttaactgagaacaaaaaaactatgattaaatgcaaaggaacctaagatacttttggaccagtagggggaaaaaggtttttacacaaattccaaaatattgtggtggtatttaaggtccaaaaatactactggagataagaaaaaaatagcagtcttaatgtggagttgttagtgtcaaaattagccttcagttaaaaacaattcttactttttttggcattttacgttgtaagatataatagccaagattaaacatgttgcctttttttggttaaagcaatgtcttttaaataaatatgaaatattattagatgacttgattagttaattaaaatatattttattcctctggataataaaagcactatatgtgtatatataataatatctatcctttagcaaaattactgatcacttgatttactattactttttggcacagtgtttttcaatctttggaaatttcaggataatttgctaatgttttatggggtgcagtaacctttaagagccctttttaaacctggaaactagtaaacaagggaatttgtaaaaagaagtgtctggagtgtccatggagcgatttcattttaaatgatatgttgagattactagcatctagagcatttaaaaaacatcattaagcttggttccagaattatatgggtttttaaaaacagctctcttgattttaaggcaatttgaatttaaaataacttgctcatttcatttgatgggtctatgatgtttctatttcaaagactttgaaaatatccaattaaaaattttatacttcattggatggccatcctagttggaataaagacttctataccaacatgagaagtaaagcaacaaagaaaaagatttttggcagagcagggcaaaggaaaaacctgcataatgtaacaggtaaactgtaaaccattttaggtgatctgtgaaacaaatgatatggtttgtatggtttaggtttttgggaggactgcctgaaccccccaaaaactcaatttagagtcttcacctgatacacatatggcttaaggggatcagcaggttgaactgtggatgtagttgaaggcactggtgtttcataaataaatggctgtggttttgagatatgaacctatatatccctttttaaaaaaactattttagtttttcatgtaatggggaaagagaaatttttactttaccttctccttttaatgagtgttctttcttatgtattatttaaggaaacctgactctttcttctacatctgctttaatatgtaacatttaattttgcactaattttctaaaatcacaatgtatatgcttttgtttgcatgactatgagtaaattattaaacaaagataaggtaaacattattataaaaatgtgatatatcttgtatgttgaaataaatcacagagatttctgtactgtcatgataacggtctacctgtttttatggatgaatgattaatgttgcttgacattaggttttttctgggtatccacaggtgaacacagttatagcaaatttcagaagtgttaatttagtgctatgcttctgttttatatgctgagcagtttttttctaaaaatttattaagtagttattatagttaatgaatacccttagttatgctgctcaagtttaacagaaaatttgaaggtcctaaggttcagttccgtgataattaacttttctgtattggttcattgtgaaaatgtgcttgatttgcttgaagcacaaaaaggtcagattttgacttctttttgaattggtttaacctgaattcaagtgtaatttgatgttatgagcttaattattgttgaggtattaatcagattaaatgcagttattagttacatttttcaaaatacagaagttgtgttaaaaaatattccagaactattcgtgattttcagtgtatggttaatttgtaatcatgctctgcaagagaagcatcaacttttggattccattcttttctatattatgttcttaggtaatcaactaactccttaagtacactattttaattctattatccttctgataggagacttttgaaatatattttaagtgataatgtttgcttatctgcacagttattatttgaaagtatgatgcatgataaccataggctgcatttttcagtaggttaagaagaatgtccactttggttctgagttctaaaaccagttctaatctggagtgtatcattcaattcctcttttgttcatcttctctgtaagtgaatgtttatttggttatagatatgtctaactcattcaataaaggtcaagtcagctacaaaagtacatattcaaaaagatgaaaaacaagatcatggagaatgtggaactattaaagtgaggtaccaattaaatcctttcataattgtgcagatgagggaatgataaggatatgcttcatgtattagtctgttcttgcattgctttaaatatgtacctgaggctaggtaatttataaataatagagatttaattggttcacggtcctgcaggctgtacaggaagcatggaagcatctgcttggcttctggagtggcctcaggaaacttgtaatcatggtggaaggtgcaggggaaataggcacgtcttacatggcaggagcaggaggaagagagagaggagggaggtgtcacacacttttaaacaaccagatctcacgagaactcactattgagatggcagcactaaagggaatggtgttaaaccatgagaaaccacccccatgatccagtcatctcccaccaggccccacctccaacactggggattacaattccacaggagattggggtagacatacagatcaaaaccatatcacatcacacagggtttaagaataacgttctttgttgtgtgaatgaaaacatggctttagtgtttcagattcttaaatgtagcatttgaaaaactctaattctcttttctaaaaatataaagacatattttagagatgagttagtgaaatccagataattcattttaaccatttcgattcccaaatgaaatttttactttccttattatgaaatattaacctcttacttccactctgagaaggatttttttaaaataaaatttattattactactctggaaaatttgtcctgtctttgattatgtaataccacttattatttctgatttcgtatgtcttttttctttattgcagacaaattgtgaatgtgtagatcaaaaggtgtaaaattcagtgtgattagtttagtagtctagatcattgtgataatgaggcccataacttgaaaaagtttgatcctctaagggaaaatttaatattaagctccatgaggtcaggagctttgcattctcagtgtctagggtagttcttggcacattttatgaccaaaataaatatagaatgaagaacatactgcagtaataatagactccaaatctcagtgatatatcagatcaaaagtttatttcctgtcattcaaattccaattcaggtgagcaagggttgtcctctatctggtgactcaggagtttagtcatcctgtgatgcacgagctaaaacaccactgtggaaagagaagtgttgaggaggcacatcacctttttaaaaaaatttaatttaattttaagctctgggatacatttgcagaaagtgcagctttgttacataggtaaatatgtgccatgatgatttcctgcacctatcaacccacccacatgcattagctatttgtcctgatgcactcccttccaccacccccctgacaggtcccagtgtgtgttgttcccctccctgcgtccatgtgctctcatttttcagctcccacttatgagtgagaacatgcagtgtttggttctattcctatgttagtttgctgaggatgatggcttccagcttcatgcatgtccctgcaaaggatatgatctcattcctctttacgactgcgtagtattccacggtgtatatgtgccacattttctttatccagtctattattaatgggcatttgggtttgtcatgtctttgctattgtaaataatactgcaataaacatatgtgtgcatgtacctttatagtagaattatttatattactttgggtatatacccagtaatgggattgctgggtcaaatggtatttccggttctagatccttgaggaattaccacactgtcttccacagtggttgaagtaatttatattcccaccaacagtgtaaaagcattcttatttctctgcagccttgccagcatctattgtttcttgaatttttaattattgccattctgactggtgtgagatgttatctcattgtggttttgatttgcatttctctaataatcagtgacgagctttttttcatgtttgttggctgcataaatgtcttcttttgagaagtgtctgttcatgtcctttggccacttttgatggggttgttttttccttgtaaatttgtttaagttccttgtaaattctggatattagacctttgtcagatgaatagattgaaaaatttttctcccattctgtaggttgcctgttcattttgatgatagtttcttttgctgtgcaccagctctttagtttaattagatcccacttgtcaatttttgcttttgttgcaattgcttttggtgatttcatcataaaatctttgcccatgcctatttcctgaatgatattgcctagattttcttctagggtttttaaggttttgggttttacatttttcttatttaagtctttaatccatctcgagttaatttttgtataaggtgtaaggaaggggtccaggttcagttttctgcatatggctagtgagttctcccagcaccatttattaaatagagaatccttttcccattgcttatttttgtcaggtttgctgaagatcagatggttgtagatgtgcagtcttatttctgagccctctattctgttcaattgatctatgtatctgtttttatactcgtattctactgtttagattactgcagccttgtagtatagtttgaagtcaggtagaatgatgcctccagttttgttctctttgcttaggattgtattggctatacgggttcttttttggtttcatatgaattttaaactagtttttttttctaattctgtgaagaatgtcaatcatactttgatgggaatagcattgaatctataaattactttgggcagtatggccattttcacaatattgattcttcctattcacaaggatggaatacttttccatttgtttgtgttgtctcttatttctttgaacagtggttttgtaattctccttgaaaagatccttcacatctcttgttaactgtattcctaggcattttattctctttgtagcaattgtgaatggaagttcattcatgatttggccctctgcttgcctattgttggtgtataggaatgcttgtaacttttttttttaattttttacttatttatttttatttttatttttttcatgtttctttacaattttattattattatactttaagttttagggtacatgtgcacaatgtgcaggttagttacatatgtatacacgtgccatgctggtgtgctgcacccattaactcgtcatttagcattaggtatatctcctaatgctatccctccccactccccccaccccacaacagtccgcagagtgtgatattccccttcctgtgtccatgtgttctcattgttcaattcccacccatgagtgagaacatgcggtgtttggttttttgtcctcgcaatagtttactgtgaatgatgatttccaatttcatccatgtccctacaaaggacatgaactcatcattttttatggctgcatagtattccatggtgtatatgtgccacattttcttaatccagtctatcattgttgaacatctgggttggttccaagtctttgctattgtgaatagtgccgcaataaacatacgtgtgcatgtgtctttatagcaccatgatttatagtcctttgggtatatacccagtaatgggatggctgggtcaaatggtatttctagttctagatccctgaggaatcgccacactgacttccacaatggctgaactactttacagtcccaccaacagtgtaaaagtgttcctatttctgcacatcctctccagcacctgttgtttcctgactttttaatgattgccattctaactggtgtgagatggtatctcattgtggttttgatttgcatttctctgatggccagtgatgatgagcattttttcatgtgtcttttggctgcataaatgtcttcttttgagaagtgtctgttcatatccttcgcccactttttgatggggttgtttttttcttgtaaatttgtttgagttcattgtagattctggatattagccctttgtcagatgagtaggttgggaaaattttctcccattttgtaggttgcctgttcactctgatggtagtttcttttgctgtgcagaagctctttagtttaattagatcccatttgtcaattttgtcttttgttgccattgcttttggtgttttaggcatgaagtccttgtccatgcctatgtcctgaatggtaatgcctaggttttctcctagggtttttatggttttagatctaacatttaagtctttaatccatcttgaattaatttttgtataaggtgtaatggagggatccagtttccgctttctacatatggctagccagtttccccagcaccatttgttaaatagggaatcctttccccattgcttgtttttctcaggtttgtcaaagatcagatagttgtagatatgcagcgttatttctgagggctctgttctgttccattgatctatatctctgttttggtaccagtaccaaaagttttgattcttctttattaatcttgctagcagtctatcaattttgttgatcctttcaaaaaaccagctcctaggttcattaattttttgaagggttttttgtgtctctatttccttcagttctgctctgattttagttatttcttgccttctgctagcttttgaatgtgtttgctcttgcttttctagttcttttaattgtgatgttagggtgtcaattttggatctttcctgctttctcttgtgggcatttagtgctataaatttccctctacacactgcttcgaatgagtcccagagattccggtatgttgtgtctttgttctcgttggtttcaaagaacatctttatttctgccttcatttcgttatgtgcccagtagtcattcaggagcaggttgttcagtttccatgtagttgagcggttttgagtgagtttcttaatcctgagttctagtttgattgcactgtggtctgagagatagtgtgttataatttctgttcttttacatttgctgaggagagctttacttccaactatgtggtcaattttggaataggtgtggtgtggcgctgaaaaaaatgtatattctgttgatttggggtggagagttctgtagatgtctattaggtccgcttggtgcagagctgagttcaattcctgggtatccttgttaactttctttctcattgatctgtctaatgttgacagtggggtgttaaagtctcccattattattgtgtgggagtctaagtctctttgtaggtcactcaggacttgctttatgaatctgggtgctcctgtattgggtgcatatatatttaggatagttagctcttcttgttgaattggtccctttaccattatgtaatggccttcttcgtctcttttgatctttgttggtttaacaaatccaacaagtctctgttttatcagagactaggattgtaacctctgcctttttttgttttccatttgcttggtagatcttcctccatccttttattttgagcctatgtgtgtttctgcacgtgagatgggtttcctgaatacagcacactgatgggtcttgactgtttatccaatttgccagtctgtgtcttttaattggaccatttagtccatttacatttaaagttaatattgtgatgtgtgtatttgatcctgtcattatgatgttagctggttattttgctcgttagttgatgcagtttcttcctagtctcgatggtctttacattttggcatgattttgcagcggctggtaccggttgttcctttccatgtttagcgcttccttcaggagctcttttagggcaggcctggtggtgacaaaatctcagcatttgctttctgtaaagtattttatttctccttcacttataaagcttagtttggctggatatgaaattctgggttgaaattcttttctttaagaatgttgaatattggcccccactctcttctggcttgtagggtttctgccgagagatccgctgttagtctgatgggcttccctttgtgggtaacccgacctttctctctggctgcccttaacattttttccttcatttcaactttggtgaatctgacaattatgtgtcttggagttgctcttctcgaggagtatctttgtggtgttctctgtatttcctgaatctgaatgttggcctgccttgctacattggggaagttctcctggataatatcctgcagagtgttttccaacttggttccattctcccagtcactttcaggtacaccaatcagatgtagatttggtcttttcacgtagtcccatatttcttggaggctttgttcatttctttttattcttttttctctaaacttcccttcttgcttcatttcattcatttcatcttccattgctgatatcctttcttccagttgatcgcatcggctcctgaggcttctgcattcttcacgtagttctggagccttggctttcagctccatccactcctttaagcacttctctgtattggttattctagttatacattcgtctaaatttttttcaaaggttttaacttctttgcctttggtttgaatttcctcctgtagctcggagtagtttgatcgtctgtagccttcttctctcaactcgtcaaagtcattctctgtccagctttgttctgttgctggtgaggaactgtgttcctttggaggaggagagtcgctctgctttttagagtttccggtttttctgttctgttttttccccatctttgtggttttatctacttttggtctttgatgatggtgatgtacagatgggtttttggtgtggatgtcctttctgtttgttagttttccttctaacagacaggaccctcagctgcaggtctgttggagtttgctagaggtccactccagaccctgtttgcctgggtagcagcagggatggcttcggaacagtggatttttgtgaaccgcgaatgctgctgtctgatcgttcctctggaagttttgtctcagaggagtacccggccgtgtgaggtgtcagtctgcccctactggggggtgcctcccagttgggctgctcgggggtcaggggtcagggacccacttgaggaggcagtctgcccgttctcagatctccagctgtgtgctgggagaaccactgctctcttcaaagctgtcagacagggacatttaagtctgcagaggttactgctgtctttttgtttgtctgtgccctgcccccagaggtggagcctacagaggcaggcaggcctccttgagctgtggtgggctccacccagttggagcttccgggctgctttgtttacttaagcaagcctgggcaatggcgggcgcctctcccccagcctcgctgccaccttgcagtttgatctcagactgctgtgctagcaatcagcgagactccgtgcgtgtaggacccttcaagccaggtgcgggatataatctcctggtgcaccattttttaagcccgttggaaaagcacagtattagggtgggagtgacccgattttccaggtgctgtctgtcacccctttctttgactaggaaagggaactccctgacccttgcacttcccgagtgaggcaatgcctcaccctgcttcggctggtgcacggtgcgttgcacccactgtcctgcacccactgtctggcactccctagtgagatgaacccggtacctcagatggaaatgcagaaatcacccgtcttctgtgtcgctcagactgggagctgtagactggagctgttcctattaggccatcttggctgtcctctcagaatgcttgtaacttttgcacattgatcttttatcatgagactttgctgaagttgcttatcagcttaataagctttttggctgagacaatgggattttctagatataggatcatgtcatctgcaaacagagacaatttgccttcctcttttcctatttgaataccctttatttctttctcttgcctgattgccctggtcagaaattccattgctatgtttaataggagtggtgatagagggcatccttgtcttgtgccagttttcaaggggaatgcttccagcttttgcccattcagttgtgggttgtgggatattggttgtgggtttctcataaacagctcttattattttgagatatgttatgtccatacctagtttattgagagtttttaacatgaagggatgttgaattttatcaaaggccttttctgcatctattgagataatcatgtggtttttgtcattggttctgtttatgtgatggattacatttattgattgcatatgttgaaccacccttgcatcccagggatgaagccgactcgattgtgtaggataagctttttgatatgttgctggattaggtttgacagtactttattgagtatctttgaatcgatgttcatcaggaatattggccttaagttttctttttttgctatgtctctgccagattttggtatcaggatgatgctggcctcataaaatgagttacagggaagttcctccttttcaattgtttggaatagtttcagaaggaatgataccagatcctctttgtacctctggtagagttcagctgtgaatctgtctggtcctgggcttttttttggttggtaggctatttattactgcctcactttcagaacttggtattggtctattcaaggatttgacttcttcctggtttagtcttggaaatgtgtccaggaatttatccatttcttctagattttctagtatatttgtctagaggtgtttataatattctctgatggtagtttgtatttctgtgggatcagtggtgatatcccctttatcacttttttattgtgtctatttgattcttttctcttttcttctttattagtctagctagcagtcaatctattttagtttttcaaaaaccatctcctggattcattgatttttgaaggtttttttttgtgtctctatgtttttctattctgctctgatcttggttatttcttgttttctgctagtttttggatttgtttgctcttgcttctctagttttagttgtgagcacatcgctttttgaagccctctctgtttaggtgacagctggcatttctgtatatagtcacatgacaccaactgcaactgcaagggaggtggaaagtggagaggggcacatggatattcatggagcactgtctctaccacaaatgaaaactaaggaaaaatatcttcttatcctgtaattctgaactctgttggttctttgtggattttataggagtatcatagtgctttcaaatggtactgtggtttaggagctaggccaacttttgtgataaatactctaaaactgctaactatgggtcttaaatgttgtctaacttctcaataataatgataattataataatggtaataattatattaaaaataaaaactttgagagttttctataaccttataccatgcttagagcttacatagattatcttatttaacctttccactaataaaaagtagattattgccctcattctacaactaaagaaacaagggctaatattataaagaacttgcccaagggctcacagtcaggattttaaactggatagttagatgagaagctgcatttttaccctttgctaaagttctcagtctagagtttcttatttgttgaaaatagaatgctaattcttacacgaaataatttgttagacatctagcacattgcctgttactcatactagcttggtgcctaataagtattcaagcagtattagttccccaccttcgtatgtaaagaaggcaggcagaagccataccttcatatgtaaagaaggcaggcagaagccataccagctctactattgattactgttatatgctttccaacataattgaaaataattatcaaattatcaaacataatttaggtcttacaatttttgctgctttattgatttttcataattcattgattccatagaataaccatctctaggccaactaactaatgtaaaagtgaaattgattccaggatgtaaccctctgctgagagtaactcttcaaggaacagtgtgaggaaatgtgctcttgagagaacaaaatttaatcctaaatatcactaagtattgtctcaaatcttcccctttaaaactcatatataaggccaggtgctgtggctcacgcctgtaatatcagcattttggaaggctgaggcgggagaattgtttgaggccaggagttcaagaccagcctgggcaacatactgagacctcatctctaaaaaaaaaaaaaaaaaaaaaaaaaaaaaaaaaaaaaaaattatctgggagtggtggcatgtgcctatagtatcagctatcagaaggctgaggtggggagattgcttgagctcaggagttcaaggctgcagcaaaccatgattgtgccactgcattccaggctggatgacagagcgagaccctgtttctaaaaggaaacaaacaaacgaatctcatatgtaaataatttgatacatatttaaaatagattaagcacatgcctttttgccaccccagaacatcaggcattattttggctgactttgcacaacaatgttggagtggtatcatgaagcaactgaatctgctggtcataactatgagaatagatagctcaatatcttctgtgccaaaagcaggatcaagactttaggcaactggttttcggtatccaaatgaccatactaaaaaaatatccagcagattgactggctaattttccacaagtgcactttgtggttaatatttcttggctatcctattgagatagattaattttatacccatgttacatttaatagtgcccaacacacagtaggtgctcaataaatatttaacaaatgagtagaatcaggccctttaaatttcttggcatccatgaatatccagctttctatcaccacacaagattgtctaggtaaactagtacatggtttagcttacaaaaagaagagaacttgttttgaagtcagataaactttaattcatattaattggtaccaccaattaatagttctgagattttgagccaattaatgaacagctctgtatgccactttctccatctgttttgagtgttcactttaacatgtttaacataataaagagtatgtctatagtaggtaagcaataatactggttcaactttctttcttcccttgtgttattgagttgagagttaatatcatacaagtcatatgacacatatttctgtgactcactaaaaatatcttatctactgcctgttttttgatttcaggtttattatataaagaaacaattgaatatgttcttcctgaagtttagctgatgaattttatctttcctatgaattggtattatatattttatgagattaataaatcaaaacctgccactcactgtggttttgttgttgttattattttttttcctttggtgttccagaagcgtgacactaagttttgtgctcaaggcaatagatattcataacttaagtcttctggtaaaactgtcatctcctagcttgctttatttgacatttgtttttaaaactggatttaatggttttattgtttctctatcttttaccgtgagctagacaaatcctttatggaaccatacagaatataaataataaatgaaagaataaaatagtttgcccaaggtttcacagctattaagtgcagaactgatccaggctcagtgctgttttcagctatatcattcaaaagaaacaaagtttaacctccaaaaattcttaaacctcaatgtttcccactcaggaactgactatcagaaacataggacagtcattcacaaatgaaaatgaggagagaatgcttctgaaatataggctattaaagtgcaatcaaagctttggacacctgcaggagaagatcaataatgtgggacatttttctttgcaaaattctatggctataggctagcaattgaattgatgatgagtgctcaggtgctgataccaaggagagtcttttatgacattatttttaacttccacatcctttgtttacatgtcgatctgcattgcttccactttttgacttttaattattcctctttgaatggtggcatcttttatatctactattgtctaaaacagtgattctcaaaatgtgaaacttgttagaagtacagattcttggccttatcctagtattactgaatcagaaactttgcattttataagccccctagctagtcctaatccatgttaaaacttcagaatctctgctgtagaccaagtattggctaagcatgctttctcaacatgaatttttttttctttgtaggtttaaataatctgctgtcttgttctatgacttgaactcaggaaacactaaaatgtataactagagaaaagtcatttttagcactgataatatttttctgtagtgtgcttgatggaatattttcatgggcacattttataaagaaaaaattatatttgaactttatagtcatgacaaggaatactatatagaagctgaaggatgaaatgtagtctattaaatatgctctgaacctttcaaaactcaatttagatttgtaagcttagggcacagatgggatctgggggaagctctttaacacatcatatttgctatcaaatttttggttatgacatcaatctaagaaaatttcctatgctattatgtccatgccttaccgcttaaactagtaattaaaatagacttttaccaattatttgagatgctttcatgaacatcttccctaacttccaaattttacctgaagtttaattcaaagtgaggtataaagaagaaacttgaaaggaaattatatgtttatgtgtgtgtgaattcacaaaccttgtaatgatgatttttaattggttgattgctgatgcttgaatccaaatctccagaatgttatgccaatgacttgtattttatcaagccctgtttctccagtgtgcatccccaggtggttgagatgcacactcatatctgagaaccagtgaaaaggaaggttcagggatatttttagttggggaaaacacagatcaagtctcccctcaaacattacaactttatacctgtaacttggcttctagtagttgctgtatacatggtagctgattgaattaatgatattgaatgagcgcaggtggttagttgctactgtgaaagttgtcaaaatcagaatggagtcacttgtgttaaaaaaagaaaggaaaaaaccatgacaaatagaacagaggaaggccataaagagaagcgttcacatgcgtaaatacctggtaaaaactatcacaaagggctgaaaaacccatgagtttgcgccaagaccatcacaaccttatgcaaaaaatgtttctgcaaagacatctgcccagcaatttcctgtcccactttggactggcattacctttgttattgatccttgtagccaaggataattatctcaaaatagttagataatcatcctcatttttcctttaaaaacctctgttttcctttacctcctggaatacacacatagtttactatggcacatatactgccattgcaatactctattccagaatatatattattttatttctattatatagaaagagcccttttctgcttggtagtttctttttgctttcagcacttttttaattctgtagaatgtattatccatactttaactactttcttatttaattgtcttcattctagactgaaccttatctttttttggttatattttgagtgccaaacctagtatttggcaaataatatgtatatcatcagcatttgttgggttaaacagttctaaatattaaatagggtagctcttagagtaaacctgagagataagtgacatgaatcgttaagcttctttggtttatttgaatatacattgaaatgttggaagaggagagacaacaagttgaatcaactatgatatattgactgagaccatagctggaaaagccacagtgaagtccaaaggcacagggccgtgccacaatacaacattaagtcaggagtctggaacacaaagttcattgccaatgattagtttatacatgcaatacagttgagaaagccacacttccaaagtgaagggaataagtaagggaaggggagatatattttcttggtttggtgaggctagtgtgtgctaaagattttgtgtgtggtcagaaacagaatattaaaagatataaagaagggtcagaacatgacaaatggcaagttaggcacttcattcatcccaaattaaacttgacagatgaattcatgttatattctagctccagttgctttttaacctttcttagccaggaaaaaaagcagggctttattcaggctgttctactcatatgccaaaaagtctagagtagaaatggaccatggtgtggagagcagttcctggtactgtggttgaaatcaaggattgtttaaagactgatgttcttttttctgccactgtccacacccattgtctaaattctaaatcctgttgttgtctccttgaataggcttgcaatgtcctgatttttaatagtcttgtttaattccctatctcatgctccacaaactgctttcttgatttcagaacttttattattgcatttgcagatcacttaatttttggtttcctgtccaagcaacataagttcctataagtccactctattctttgaggtcttagtgcatttgcaatgaatgctgccaccatatccgatgcaatcttaggttggtgcctgtcacacgtattctactttcaagtctgtctcagtcttatctggaggcctcaagatcctagcactggatttgtaggttttgccacctgtgttcacatgggctccattgtattctcctcatttacatcactgatgctgcttggatccctttctaagtgaatatggggaaaattagatagtacttctatttcaagtttttatttagagatgaaatgccaaaactttccaggaaaaatagttttattatcaatccagaggttcagagcccaaggagatttaaatctttcaaattatatcagaattcgattttcagaaaagttagtgtatgttaaaattatacaaaaagtctttggtttagattctggactcagaacattataggcagatttttcactaattaaagctttggcaggacactcacaagttgtgaggtatgtgagaaattattcattgcgtgggaatgtctcacatctcacttcttgtaggacaaccagcattctttgacaaaccaaatcaatctaaactgtacctctccccttattgtggcattttaaaacctgcccacaaatctcctaaatgccccaaatgggtcaaaaccacctttaatgagaatcactggcatagattgtttaattttcagtcactgggattggggaggaacccacagaaaatgtgggtgcttaaaacctgaacaaaatcagcaagaagggtgactgctgggaaggcatccaccagtgtatgccacaggaatgggctagatgatattctgtgaggtcccttctagctatagaattcttactatttatgtcataagtacaatataagatcatttgtggataaataatcacaggtaatggatatttatattatacatatgtattatagttcaaaattttaaagacagactcatcaattactaaatataattgatagatgaacttctcttaaaaataaaaaatgcaacaattaagatatttaaaatctaagcttccaaaaaataaagtgtcatatggtattttagaataatattaattcaaagaagaattttgctatgcttaattcagaacaatagcatttgtgatattaatgaggacaaatgaagtcaagactgtttaattcaaatttacccaattaaaataattaaaactttacataagtttgtatcttagttctttctgagaaaaggttgtagatacaattttttatctgttctcatgtgactggtataatgggtgaccagtgatcatctttgtcttatttacttgaatcctgaaggatctaatatcacctctgagaccaatgcatgttcagtagctatagatgtttattctataaatgaatgtctctatgagatactttagaaaagattatgtgaatcaaatctaagattagtctattataaatagttttaatgatgaaaaaaacaatttctttgcattttttccctaagctcttttactcgaggtaatcttgcatggactgatacatattttttttctatgtgaacttcatgaactagatgatagatggctaagtgtcagtaatcattaaaagaacaagtttctgtacatctcattatcattctgcctgttcacttgcctcatgtttttgctgttcttctttttgacagggattcgataaacaagtggatgtgtcatatattgccaaacattacaacatgagcaaaagcaaagttgacaaccagttctacagtgtggaagtgggagactcaaccttcacagttctcaagcgctaccagaatctaaagcctattggctctggggctcagggcatagtttggtaagcggaatggatttgctgtatttttaaagggaacacaccgtgtgcaactactagacacaaacacacaaacaaacaaaatccccaaaataaatagcataatttgggagggaaaaataatcctactgaagaaaaaaaaataacattatgagcattatgtttaatttgttatccacttgctaacaatatatacaacttggcttgtgacatgttttttttttggtcagagaaaaaaagttattacacaagaatcataaagaaataaagagaaccagagattttctagcagttgctaatgtatttgtagagttttatttgttgcacagcaagaaatgaggggacatgtcttaagataacagcaaataaaactccttatatgctagagtggaataaaagctatttcaaatgtttctgtaacttttcaaattcagtgtttgaaactgagttaccgatttagaaaaagtagtattttaaaaatgtttgcctcatgtttccaaaatggaaagattctgggctgcttagtaacaattcttttatgacatttttgagtagctaattaaaattatgacaaatctagatctgatttacctaagactcttgcaaaattcatgatatcaggttaattgataagcatttcttttacacagttttaatttgtaatgtcacaaccaaatgtatttaatataaacttattagtataatcatttttaatctttctgatggctcacacagataagtaaaaattcagggcatgtaccctgaatatgtatatttatatatgtgtatttatttataaaggatatttatttatacaatatatttatttattactgctacattcataatgtccatttaaaaacacaaacacttttaagggatgagatgaatttacagcaaatcaccataaacttagccactttcttgctgatcttacagttctgtaggtcagaagtcctacaagatttcattttagcccagtggggctaagatcaagatggtggcaggctgggttcctttccggaggtgctggaagagaatctatttccctgatcatttgaattgttggcagatttcaattccttgcagttgtgataaaaaaaaagaggtttaaaatttaaaatattttaaatgttttaaagtttgtgtttaaatggctaagtttatggtgatttgctatgctagcaatattaatgcacatggtatagtaaagattctaatattaagacaattgctgtaactctcctaaatttaccagtggcgggagaaaaagagtagtttctggctacctttcttgatggaaaattgtagaatattaacatgagaaagttttcctgactaagattctcagtccaggtgctcaaatattaattgggatagtttcattttcctttgaacagacctgccacagatttgtggcagtgaaactgagtactgtcagtgaaagaaaactgatagacctttaatgactcaaaaatagatccaaagcagcattttgctcaggaagttaacagattatcacaaagatttgaacattttctaataattttgtagtatgttttataggatattttgggcctctatttctcctttctatagggtggaagttatctttggcttagatatagatactgcaaaattttttatattgcctttgtcaactgtgagctcatctgcctctcttatgtcaaatgcatccattcccagacatgcttctgaaatccacagaccttttctatgtgcacaactgtcagagtacataatatcttgaatgttccatgcaatcctgagtatagtgactggtgcaaactggaaactgggcatatctgagatctctgatggacagacaaactgaaacatatcattaatttattttgccttattttctttggagcagaaatacaacatggaggaaaaaattacaaaacagatatcatcatttttgtccatgtgtcaccgcatgtaattttgcatgtgtatgcaagagaaattctgcttttcaagcataagtattggcatatggatacctattatgtcatagaatctccatcctcctaacttgtttgaaatggagtctcatttctactgttctggttaccttaaacttgttattgggtttttacaatcttttcccccactttggactgttttatttcttacttatcagcatgggggaaaaggtaatactaaaatatcttcaaaagaagttattactatactatatttcatttaccattgatggtaggtcaaaaatgtcaatgttgagcatgattaaacaaaagctactgtgaaatattggaaaaaaatgaaaattttccttctgcctttgagggaaagaaaagattatctgttgaagcagaaacaatgagaattattctgcttcactgtgtgagctgagaagttctctacagcctcgtaggtggggaattgtagaataatctgcaagatgagtttttagcaacagtggtcaggatccagaagagcaactcattcagaacatttttccaatcatcagaagagggtctcattagtgttttttctgttaccaactccggaacaaaaacaagcatgggaagaaatcaacagtaggggtttcattgttttcactcacatctatcctgctgtttcttgccaagccaaggaacattttctactttctcatttctctctctaaagatgattcaaatggacagccaaagtggtggcaaaagttaacaactaagtttagcagagacagcttgccagggctggtctgctctttaactgaaaagagctgattgtatggttttaaatgaaaggaagtgaagccatattatttctgtcttggtggtgttacacaccatcagcttgtaagtggtcacaattcaattttgcaagatgatgttaggcaggatatttacagaaaactgtaagacgaatacaattctaagataaaatcatagaattgtaaaatatctgtaccttgaaaattaagtatttaaaaataagatgatacattttatgttaaccaacctttaaaaaaattccacttggagctagaggatggcatttaattaaagttgaaataatcatagttataagatgccctgggaataatccaatggattagtttatcttaaatggaatatatatccatgtatatgtatacgtacccgtatttgtggtttagctttctgtggtttcagttacacatgatcaactaggatacgaaaatattaaatgaaaaattccagaaatactttgtaagttttaaattgtacaccattctgaaatcttgccctgtctcactctatctcatcccatccttctggggatgtgactcatccctttgtgtagcatatccaggctgtctatgatacacctgttggtcacttagtggcagtctcagttatcagagcaactgttgcaatattgcagtgcttgtgttcaaatttttcttattttaattaataacggctccaaaatacaaaagtagtgatgctggcaatttggatgcagtaaagtgcttcctttaagttaaaaagtgaaagttcccaacttaatgaggaaagaacaaaaatcttatgctgagattgctaatgtcttcagaaagaatgaatcttctatttatgaaatttgaacagtatgttattgcagttgttctatttattattcttgtgaatcccctaccgtgcttaatttataaattacactttatcataggcatatatgtgtaggaaaaaacatagtatatatagagttcactattatccagtttcagacatccactgggggtcttggaatgtatctgcctcagacaagggggtactactgtaatgaatatgtaataccaatatacgattattatatattatatatacatacatattaatccggtgggttagtttatcttaattggttaggtatcatatatgtcattttaaatattatatatatgataggatatatatctttttgttttggacaaaaatttgaaaaaatcatttctggtgaatgtccttcaataagtggtctacagtaacaagactatgcagataaacaatttaagatataaattgccaggcatgttcagcagaaactcaggtgttcacatattcttctttgaaaaaaagttctcccttttaaatgtgctcattttcatttaaaaaaagacactatttactctgatgtgtttagcagctttttccattttgatgatgaatttgatttactccatccgcactctgatttaatcacccttgaactaataacatccatccacaaaatgattggaaaaggttgggaacatcttccctaaagggttggtaaatatgcaccagaacaaaagtgattgaaagttggccatgttagggtgcatgacagaaaggtatttaatatatatttcttgctgataaaaattacgagaaaaattgatgaagttctcaggattctgttaaaatttgcatatttaaatattatagattcaattgtcagtactttaagataccttatattatcatctttagtaattatagttacaaataaacttatgccgaaaaaatattttttttcccattgtggtttatcagtgatagcttttaactttcagtctttcagaatctaggtttactcatctgtaaaatggattttctcataggactcaggagagtacaaaacaagctagatacataaaattgctttataaatctgaaattgtcgtgacttttagtagattcaagaaaggaaggcttatgatactttttcttaacaatggaaaattgtaaaggtcagcacatgtaacctaggaaaatgcctgatggtaacagttgcttcatcatcacactgtgtatattgtatacatattacagttaagagcatgggatttaataaaataactttactaatactccatcatggaggctggcagagaagcatttgaactttttttttctcctatctttcatccagggcttcagttaaccaatattatttacaatatgttagttgtaaacattagtttttaaatctgcagcacaatttcacagggccagctaaggatctttaagcacagaatatggatgggagcatcttatggttatgaggttggtgacatgaagagagatgggtaagatcatccagaggttttccaaagcatcactcttcctcaataatacaaaacagacttgatcagtgggccccagatgattttattttgtttctgcaaacattactcaagctcttgtggcacatttctcttaagagtttctaatgagccattacgctaaatgacacggatttaatcacacatttccatttagcccctgaccagtggaaatgattatcctctcatgtacatctgtaatatcagcatattcttcatccctggcattttccattaattttaaaattttggacccttaatcgcaacctccttgaaataaggaacactgagcttcaaaatactgtcttttatatatgtagcaggtttaaggtggtgatggcccagcagaataggacagaattagacactgtattcttccacattttgctgttctcctaggcctctttgcacagtacaggccacacatatttaccatatttctcaattgatcaataagactggtaaatgtcattttttttcctttacgaagaaaatgtggtgttttgaaaagcaatgtgtagaagtttgatggcagtatatttacagaaaaaacaattatacatatatgtaatacccacatttctatgtgtcaaccataaattatatgtgtgtccttatgtataaatatttaattgttgatgtgataactaatgctgaaggggttggtaattcataatcttaaaaattatttttggctttggaatgttttgtggacatttattctgaattctgtcattcttcagttaatttgtaattaacttacatccctgtagtaaaaactgacagcaagagtttgtagcctgggagcacttttcttggcagatttgaaaaatagtcatttaaatttccatagataattatttacttacagatgattgagtcttttctgtaaatcatttgttgatataaatactaatgtccctattagaagaaataattagtaaatacattatttatttttcagtttcaacttccctcctaaagattaaatagttaagtgatgctggttcttattttttttagaacttgtcttttagggcatcagtgaatattttcattgtggaattaaagtcagtttatagtccatatactattttttcagattaatcctgattgttaggattaaaatgtatccatggttatgttaaaaagtaacctacagcccaaatataaatatctaacaagttaatctagcaccatccagtgcatcttggaaaagccaaaattcctcacagaaaggaggcagtttgatcagttgaattaaattatgctaaataacaggtggcaatggctgtccctcagattctgggaagcattctcatttactgctctaagagacctgtgcattccatctgtagataagctggctttgttttttttaaaaaagatagtaggtatgtgttataaattttgtaacgaaaaataccaaggcttagaggagctttttatacagctcagagggaaggtagttggcccttctctctactaagtcatgcttctggcctgttacagcattactttctgtttctagagtctgagctgtctttgctaatcatggatttgaatgtgggggctgaggacaaaggaagacatcttttagtttggaagatggagtgacagccctatcattccctttgtgcgctctctgcctctcctgtgatggaatttaaatttatttaaaatatttgaccttgtcaagtaagtttcactttacatgtccaaagttatgaatccagcattgagccattgcattttaagcttctgtgtatgacaggagagtctaaattatcatcagggaaggtactcagtcacttcatttgacatttatttaaatacatgtaccttagggttcttgtgctgtgctcttcttcatttctattcttctttattttttatcattaaaaacatttttcacagattttaatatgtccattaataaaatcatgatttcactctcaatccagggagatgcaaccccaaatatatttttaaaagttttcctttgggttcaccaaggacatcagaatatggatgggaagtgtgagccctgcacaagaggactgagatgagggacttgtacgggcggaactccagcctgggctctacccgtggactctgatacgtggtcacctccgcctcgaggagctgctttttctcacacccacaccaggtgggctggcagcaaatattaaatgaactttagatttgaagtgaccatgacagaaactcagtttaactagcaaaaatataagttgcaaaatacttagtttacagaagatctaatacatctgggatgttaaataattcactggcatgatgatttaagacacctgaagaaaatgcaaataatcagggagcagaggaaaattataagccaaattgttgtcatgttaacattctcccttctcttcagtgaccctgcttctctcatcccttttccctccctacatctttttatggacatctctctttcaaggcatccctgttctctgaacctgtcacactcctgctggattaactttttcaccatctagccaggaaccatgaagagtgatttcagacactctcagatgctctttattttctcacctccttgtcctctgaagctttgttttccaaactctcatccggatcagcccaagtggctgttttctctgctcctgctggaaggctgagcccagctggaggaatgatataatcacactgatttcctccattataagtttatgagcttcatcctcagctgggcccttgttcctgctcagcaaccattttgcatatatgtctcgtcagctccctagccatttcccaaggcggctgttacaatccttttacaactttcatgaaagctcccaattccacttcaccagcaacattctttacagaaggtcttacctcctacttccctgagaaaacagatggactcaggcatgtaaactctcaatttccccttcaatctcctaactctttgtcatctccagtcttccctgcccagttagttccttcatgagggacaccgtcaggctggccacccacctgtgttcttgattccatctccacccgttgggacctattagtttttgtctgtcttgcattgactgatgcttcttctcccctgcctatggacgacctctcaccaaattctcatctacaaaaaaagttatttagaatgtgcctacccctcaaacaacccctctttctctccttccctcatcatcacacttcttgatagtctgaagttaatgcctccacatacctttttagttctcattttacaagcagttccaattcttttttttgagacggagtctcactctgtcgcccaggctggagtgcagtagtgcgatcttggctcactgcaagctccacctccctggttcttgccattctcctgcctcagcctactgagtagctgggactacaggagcccactgccacgccctgctaatttttttgtgtttttagtagagacggggtttcaccgtgttagccaggatggtctcgatctcctgacctcgtgatctgcccgtctcggcctcccaaagtgctgagattacaggcgtgagccaccgcgcctggccaagcagttccaattctatcacattacccctgtggaggaggatgctctggggaggcaaccattgacctcctaagtggctaatccattggcttctttttcagctctcattttattattattatttttatttcaatggcttgtgaagtacaagtgagatttttttgttatatggatgaattatatagaggtgaattctgagattttagtgcacccatcacccaagtggtgtacatgttacctaatgtgtagttttttatcccttgaccccctcttaccctttttctcctgagtctctgaagtccattgtatcacgctgtatgcctttgtgtactcacagcttagcttccacttttgagtaagaacatacaatatttggtttaacattcctatgttacttcacttagaataatggccttcagccccattgaagttgctgcaaaagacatttcattccttttaatggctgagtggtattccatggtgtatataccacattttctttatctacccatcagtcagtgggcacttacgttggttccacatctttgcaattatgaattctttggctcccgtttttttttacttttctgtaatatctggaaaggttaaatatccaattcttcttgaattctatcttcttttgaattttaagctaagaattttaaaaatctggggctcgtttggaatgggatggactggccaacatactgagggctgtgaaaggccgtggttagagtgcagactctaagatcctggctccctcttacctgtgtgggatctcaggaactttatctgaagatggggctggaagaaataactatgtatgcacagaattgctgttaaagcaaactaaattagttaatacagtgcctggatttacttagcagtcagtgcctgttagttttcattattgtagctggcctggcttatggccaggttctcagaggttggtttgattagggaactgtcttttctagttcaatgttcagaatgccagtaaaataatccaatccaggttgggtgcggtgactcgtgcctgtaatgctagcactttggcaggccgaggtgggtgtatcacctgaggtcgggtgttcaagaccagcctggctatcatggcgaaacctgtttctactaaaaaatacaaaaattagccaggcgtggtggtgggtgcctataatcccagctacttgtggggctgaggcgggagaatcgcttgaacctggggggcggaggctgcagtgagccgagattgcggcacttcactccagcctgggtggaagaatgaaactccatcaaaaaataaataaataaataaacaaataaaatccaatccaaagccactgaggccaagatttgaattggtggccagagcaaaaggagtcagaaagacaggtactaattttcaagcctaatgagaatgagattctaaatgagagaaggaaggcaaaagccaagaaccaggccagaactggatcaaagtgggagaaatttgggaacaatggaatgaatctagcacatatgtcatgaatattattggctggtggttgaatgttaatgctattagactaggttgaagccaactgtttcctggtgccctcctacctctatggtcaatcattatctaaccttttattgatcatctgtctctacccttcaaatatttgtattttaaaagtgttcttcctcctttgtgcttgcgtttttcacagttcaatgcctgatgtcttctgtcttttggctgtactttacttctaagccgttggtccatgaattatttctgtactcttatctccttcagattcctccacagatatctcaaattcagcatgcccaatataattttatgatcatctactcaaacttgcccttcacgatgtatttcttatttgaggattgctattccttcagttgcctcagttaaaaattacggagtcatagtttcttcctttctctttccagattgagtctaattgtttctatttctgaaatatcccttccttccatttcaactgccttttccaggtcttcatcataccccgctgggctatcatcatggatagttaactgatatccctttccccctccttatctcttcttctcctagtccgtcttccatactgcttatgggtaaagttgcttacacaataaaattcaaatattttggaagggcatactagtcattgttctcaaatgtgctgaccacttttatgcttcgggtatttatatgaagctattttctttcacctgaatgctcttgacatgcttgccattttccctgggaatccctgggaaattgctctcattttcacatttcagttatggggtcaccttttctgcgaagtctcaagtcaccttttctactgctcagcaaaagtaattgccctctcatctgtattattatgacatgttatacttacatctcttttggaactctttatatttttattgctattaaaatctgtgtctgctgctagatgatgatctccttgggacaaggattctgactttctcatccttatagtctgaagatttcaaaaagtgcctgttgcataatgttaactattaaatttatcaataatgtaatgtgtatgtttgaatgtgtgtatagtatgtatcagataaatagtatgacccactaatttcaggagtaatacatcaaatcataaaatgtactaataacggaggctagcatcacctgtaggaattagatactgttgtatgcaaacatcaattcaattattagaataagtctaactttctcttaaattatgcctttgactaatctgaagaatgagttagtaatatgaaaattgatttttcaaatcatttattaaatactataccaatttatatctgatttgataataaatatcacagatatatggcaaattttaaaagaatcattaaatagtacaatctgaggacttgatacaaatttactaaaagtattctttcatattttggtgtcaatgtaagagagataaatagtcactataagttaatatttatggtatccttacagaatgtataacattagtatcataagtttgggaaataagacatgaatgtcattgatatagctaaactcagtattggaggtatatttattagtgcctggcacatgaggagctttactagatttaaaggagaatgaagaaatgaaaaaaatgcaaatgatggtggttgtctagattcattgtttgtaaactgaaataaaggaaaaagacatttgggaggctgaggcaggcagatcgcttaagactggaggagtttgagaccagcctgagcaacatggcaaaaccccgtctctaccaacaaaaacaaaaattagccaggcatggtggcatgtgcctgtggtgtcagcgactcctgcggctgaggtgggagaatcccttgtacccaggaggcggaggttgcagtgagccatgatcatgctactgcactccagcctggctgacagagcgagacactgtctcaaaaaaaaaataagaagaagaagaaaaaaagaaaaatatattaatcaaaacaaaataaaaaatttaatcccatactaagatcgctcataaatgcactttccttcagtgggtttttattgagttactgactcatattagacactgggctatgtcatagtgatataaagttgaatagaaaggaccaaagatcctgccatctaatcaagagattgatgtaatacataaatgccatcacttttcttgggctagtttcttcacatccttcagttcatatacattggttaggataattttggctgctgtgacaaattgaccaacagaaaatgatagaagctcaaacataatagaagtgttcttctcatttatcaggtggaggtggaagtagataggggaaagattttggttctgttcagtgagctgaggagagagactgatgaaagctctggcatattcatcttgtaacgtgtaagggctccaaacagccaaaagcatggagctacttctgtgggccaggcctggaagtggtgcgtttcccttttgctcacattccacctgctagaactctgttaaatggctataacctaactgcacaggaggctggaaatgtcatctagttgagctgtgtgcccaagaaaaggaaaaagactaggattttgcagtctttgccctctctaaaatgtctatcatcctcctaaatccagtgccagtacccctctgaccagcttctacataaccttgtattttcacaggattattagcatcatcacattatttttacattgtctccttacattgtccatttcccactagactgtaagctccataaggaagactgtcaggcttgccttcagttgaatttctaactctaacatagttccttgcagagtaggcacttaacaaatattggagttaaagttctgattttcctttctacatctgttattcactctcagctcactggaatccatttctatgcactctactctgttgaaactgctcttgctaaattaccagtaaaccaaccaaaatgctaaatgcagcaagtagtctctggtctccatcttatttgatttggcactttggtactgtcctcttcaaggtttacttcttagtttttcaactgtattttcccagttcttagacggactccttttctgtgaaattggtggtgcaaagaagagctcttgggtgttaatagcttgcaacctcaaaggtaaagaaggtctacatttttttttaatggcaggagagtgtgtttactctattagagaggaaatgctggatgttacaggtaaggcatgtggaaagaaaaacagaaagagagagaggctctgagacagagtaaaagaggagaatgagacagagagacagaagaagaaagatacacagaaatagcaagaaagagagaaatagatgacagatacacaatgaggaagaggaagagagaacacacagacagagagatgtaggaacatcaagcaggcagctgagagattcccagagagaaatggagagactcaagaaaccaaaaataattgttagagaacaatttcggaggaagcaggatggtacatatagaagtagctttgaaaagaagcagtaattctttgtgaaacagaaacattgagaaatactatttttgcttacaataacacatgtttggtatgctgtataatatttcatcactaattttctaaaatcatcaaatagagatagaaattttttttttttttttttttttttgagacggtgtctcgctctgtagcccaggctggagtgcagtggcgcgatctcggctcactgcaagctccgcctcccgggttcacgccattctcctgcctcagcctcccgtgtagctgggactacaggcgcgcgccaccacgcccggctagagatagaaatttgaatggaccaagaaatcttttgacccttgtgctacataggaaaaagcaattgaaaggaaaagtagaaaaaaatactagaaaagatcactggacccagagtaatttttgtaaaattgccacttttctgcttcgttgtattttaaggaggataaaactaattggtagaagtgctttatcattgatatcttttttgtttttttgggttttttttggtaaacatattaccgggtagggaatagaaacttagacttagctactgtgtccatagtgtgcaaatttatccaattgtgttcatagagttgtacttatttagcagctcactgtaagtttttaacatttgtattcctttatttttgtcctgaaagcaaacatggagtttctggatcagtggcagagtattattactcaaggcaataattatatcagttacccatgtctccttcactccattcagtgcaatattataaaagacagatgttatcctacacatgcaaagggatttttgcattatcaataagaaattatgaatctcagagtttatataaggcctgctatacagctgccaccttgctaagaagagagagagaaggaaagagagggagagagatctaattttcctaaagtaagtattctctggcaggagaaagagaaagtccctattttacaatcatttggaatgtaaatgtatgctctgggattcacccactttgaaatgaaaacaattttttctctagaggttcttctatactctttaacttccaagacttgtcctttaaccagattcttgctttatctgctcaaagagccctgacaatgcagaaatattaaaatatctctatgatgtaggtattattatttacattaataatgtaaaattccagtcttataaagtaatatttctggattcaaataatcttgtaaaatttctatttaaaaatactttaaaataactgtattataaaaacaattgtttttaacaacccctacttaactggaacacaagatcttttaatgttttacttaaatcaatttataagtgcatgtgctgtggctatatacacatatgtgttaagtgtgcagaaatcaaaattacccccttaaacacaccccccaaaaaagataccagtaatttggcaccttctcacaagaatactgctaactcctcttgtatgcattcaaaaaatatttagcaatttagtatgattaattgaaactatgctgttttcacccttattctctaataagcttaggatctgataactattctacttggttatcaaaaagcatgccagaggaattttagcttttgcccatgtgagattttttttctcataaaatatatgtctggagaattgaaagaatgtgtattaataagatgttgtaaaagaaagtcattctttatttcatgtgtatttcctcatatgcaatgatttccttgaggttgggaatcacatctatttcattatattccattccatttaatacattttaatgaagcacttaatatgttccagatactgtgttgtatgcttgagctactgtcatgagcaaaagaagacatggtcctcactctctttccaagttttggtctagtaaatagaatctggttgtgggtatctatattacaatatactctgaaatattctaacaaagagacacatagtacagtgacttgaacacttctctcttccactgaagtctgagttcctgcatagttccagggaataggacaattctgtttcacagaaacacaggaatcctgacagtgttgttctgtccatgtgaccaaagccactagggtcacattccagtttatggaaagagaaaaaaagcaagtggagagcaagctgtctttctataaggatattgatatggtttagctgtgtctccacccaaaatctcatcttgaattataatccccataatccccacatgtcaagggtgggaccagatggaggtcattggatcatggggacattttcccccgtgctgttcttgtgatagtgattaagtctcaggagatctggtggttttacaagcatctggcatttcttctgcttgcactcactccgtcctgccaccctatgaagaatgtgcctgcttctcctttgccttctgccatgattgtaagtttcctgagacctccccaacaatgtggaactgcgagtcaattaaacctctttcctttataaattacccagtatcaggtatttcctcatagcagcatgagaatggactaatacagatatgacctagaagttgaatatttctcttctgccctcacccattgtcttgaacctaatctagctgtaaggaaagctggaaatatatagttagctgaatgccatgtgtctgtgtaaaactagggaagttcttataaccatgaggagggagggaatggatcttgggagaccattagactctgaaatagcaaatcttccatttctggatctggtaactgatatccagtccctctccttgttcatctgactttgatgtatgggctttgcttcaaatcagtgtgggttttacttcttgatccttctaaattgtgtcccagccagctgcattatatggattagagccaatagcttctcaagaaataaaacaatctaacataatttatatgacaaatgaaataactagtgtcttgctagaatgatgcaatcaccctgtttgtctccctcaccctgttttcccaagacctatcacagtgtcttgaacataagagatactggaaaaaaaaaccttcattgaatgaatgaatgaatgatgaatgaatcctctagaatgtaaatggatagctctgggtttcacctgctttgaaatataaacatgtgtctctctggcagtctctctttattcattctttaacttccaaggcttgtccattaacgcagctccagttttcttcgtttagcaaaccctaccgatgcataaacattagcatacctctctgaggtaggtacttgctgtggtttgaatatgttttgtttttcccaccaaaactcatgttgaaatttgatccctggtgtgtggttgttgggatgtggggcctagtgggaagtgtttaggtttggcggtggatccctcattaacttcttggtgcagttcttacagtagtgagtgaatttttgctcttgagagattggattaattcttgcaggaatagatcagttcccaagaaagtgggtcgttttaaagccaggatgcccctcagttttcctcctctttgcacatgttcactttccctttgatggtctctgccatgttgtgacacagcacaaaagcccttgccacaagccagggccatgccctggaacttctcagcctgcagaaccatgagctaaataaacttcttttcaattacccagtctcaggtgttctattatagcaacacaaaatggactaagataggactgtcatacatattagtaatgtaaaattctagcctttagcacataaagaaacttataggctacattttagatttagcctatacatttgctcaatgtgtatttttaaaagtgtattctctatcaataaattctacagagctttttctcccatagactctgtaaaatatccaggcctatattattattaccccaggaatggcttttctttctgttttaagatgctatagcgcaatgttaatttctttttcttgcattctataactgatagtctttgctataataagagaatggtgtcttaaacttcttctggctagaaagagtaagctaccagtggtgtagaaactgaagacagaatactcccccacactgaataaagatgtggacttcatgacacaatttcctcaggttaaaaaagctcagggggttatcttgggtcactagatttgaggcatttgctgtagctctttgtgccttgttcagcagttaactatctcatgttcaccataggactatcattttaatattttttgtaagataccagtgtcatgtttttgtaaactatatcctttctgtaaggtaatgaatcattctgagcttgacttgtatgttgtggtgtgggtgaactctttagaacatggtacaaggccttttaaaacctaagtcacaaataagctgaatgactttgaacaagttaattgtatttttaggccttaatttcctcatgtctaaataaaatgagggtattgggtattggttcaatgattaatggtctttctagctaaaaattcagtctggatatgtagattatttgctatttagagaaatgcataatttatgtttccttcctttttgaaaattgctgttgacaaacacagtgcttttgacactttgcaaagtatttattgtgcatctagtaagaaactgaacttgggagcctgggaagtaattactaagtctctagcagccaatagttatgcgtgcatgcgtgtgtgtgtgtgtatttgtgcacacctgcctgtgcatacacatgtatgtgtaatttgtagctggttgaaatcagaatgcatacataaatttcctttaatttttttttttattattatactttaagttttagggtacatgtgcacattgtgcaggttagttacatatgtatacatgtgccatgctggtgtgctgcacccactaactcgtcatctagcattgggtatatctcccagtgctatccctcccccctccccccaccccacaatagtccccagagtgtgatgttccccttcctgtgtccatgtgttctcattgttcaattcccacccatgagtgagaacatgcggtgtttggttttttgtcctcgcaatagtttactgtgaatgatgatttccaatttcatccatgtccctacaaaggacatgaactcatcattttttatggctgcatagtattccatggtgtatatgtgccacattttcttaatccagtctatcattgttggacatttgggttggttccaagtctttgctattgtgaatagtgccgcaataaacatacgtgtgcatgtgtctttatagcagcatgatttatagtcctttgggcatatacccagtaatgggatggctgtgtcaaatggtatttctagttctagatccctgaggagtcgccacactgacttccacaatggctgaactactttacagtcccaccaacagtgtaaaagtgttcctatttctccacatcctctccagcacctgttgtttcctgactttttaatgattgccattctaactggtgtgagatggtatctcattgtggttttgatttgcatttctctgatggccagtgatgatgagcattttttcatgtgtcttttggctgcataaatgtcttcttttgagaagtgtctgttcatgtccttcgcccactttttgatggggttgtttgtttttttcttgtaaatttgtttgagttcattgtagattctggatattagccctttgtcagatgagtaggttgagaaaattttctcccattttgtatgttgcctgctactctgatggtagtttcttttgctgtgcagaagctctttagtttaattagatcccatttgtcaattttgtcttttgttgccattgcttttgatgttttagacatgaaatccttgcccatgcctatgtcctgaatggtaatgccttggttttcttctagggtttttatggttttaggtctaacgtttaagtctttaatccatcttgaattgacttttgtataaggtgtaaggaagggatccagtttcagctttctacatatggctagccagttttcccagcaccatttattaaatagggaatcctttccccattgcttgtttttctcaggtttgtcaaagatcagatagttgtagatatgcggcgttatttctgagggctctgttctgttccattgatctacatctctgttttggtaccagtaacatgctgttttggttactgtagccttgtagtatagtttgaagttaggtagtgtgatgcctccagctttgttcttttggcttaggattgacttggcgatgcgggctcttttttggttccatatgaactttaaagtagttttttccaattctgtgaagaaagtcattggtagcttgatggggatggcattgaatctgtaaattaccttgggcagtatggccattttcacgatattgattcttcctacccatgagcatggaatgttcttccatttgtttgtatcctcttttatttctttgagcagtggtttgtagttctccttgaagaggtccttcacatcccttgtaaattggattcctaggtattttattctctttgaagcaattgtgaatgggagttcactcattatttggctgtttgtctgttgttggtgtataagaatgcttgtgatttttgcacattggttttgtatcctgagactttgctgaagttgcttatcagcttaaggagattctgggctaagacaatggggttttctagatatacagtcatgtcatctgcaaacagggacaatttgacttcctctgttcctaattgaataccgtttatttccttctcctgcctaattgccctggccagaacttccaacactatgttgaataggagtggtgagagagggcatccctgtcttgtgccagttttcaaagggaatgcttccagtttttgcccattcagtatgatattggctgtgggtttgtcatagatagctcttattattttgaaatacgtcccatcaatacctaatttattgagagtttttagcatgaagggttgttgaattttgtcaaaggcttttcctgcatctattgagataatcatgtggtttttgtctttggctctgtttatatgctggattacatttattgatttgcgtatattgaaccagccttgcatcccagggatgaagcccacttgatcatggtggataagctttttgatgtgctgctggattcggtttgccagtattttattgaggatttttgcatcaatgttcatcaaggatattggtctaaaattctcttttttggttgtgtctctgcccggctttggtatcagaatgatgctggcctcataaaatgagttagggaggattccctctttttctattgattggaatagtttcagaaggaatggtaccagttcctccttgtacctctggtagaattcggctgtgaatccatctggtccttgactctttttggttggtaaactattgattattgccacaatttcagctcctgttattggtctattcagagattcaacttcttcctggtttagtcttgggagagtgtatgtgtcgaggaatttatccatttcttctagattttctagtttatttgcgtagaggtgtttgtagtattctctgacggtagtttgtatttctgtgggatcggtggtgatatcccctttatcattttttattgtgtctatttggttcttctctctttttttctttattagtcttgctagcggtctatcaattttgttgatcctttcaaaaaaccagctcctggattcattaattttttgaagggttttttgtgtctctatttccttcagttctgctctgattttagttatttcttgccttctgctagcttttgaatgtgtttgctcttgcttttctagttgttttaattgtgatgttagggtgtcaattttggatctttcctgctttctcttgtgggcatttagtgctataaatttccctctacacactgctttgaatgcatcccagagattctggtatgttgtgtctttgttctcgttggtttcaaagaacatctttatttctgccttcatttcgttatgtacccagtagtcattcaggagcaggttgttcagtttccatgtagttgagtggttttgagtgagattcttaatcctgagttctagtttgattgcactgtggtctgagagatagtttgttataatttctgttcttttacatttgctgaggacagctttacttccaagtatatggtcaattttggagtaggtgtggtgtggtgctgaaaaaatgtatattctgttgattaggggtggtgagttctgtagatgtctattaggtccgcttggtgcagagctgagttcaattcctgggtatccttgttgaccttctgtctcgttgatctgtctaatgttgacagtggggtgttaaagtctcccattattaatgtgtgggagtctaagtctctttgtaggtcactcaggacttgctttatgaatctgggtgctcctgtattgggtgcatatatatttaggatagttagctcttcttgttgaattgatcactttaccattatgtaatggccttctttgtctcttttcatctttgttggtttaaaatctgttttatcagagactaggattacaacccctgcctttttttgttttccattggcttggtagatcttcctccatccttttattttgagcctatgtgtgtctctgcacgtgagatgggtttcctgaatacagcacactgttgggtcttgactctttatccaatttgccagtctgtgtcttttaattggagcatctagtccatttacatttaaagttaatattgttatgtgtgaatttgatcctgtcattatgatgttagctggtgattttgctcgttagttgatgcagtttcttcctagtctcggtggtctttacattttggcatgattttgcagtggctggtactggttgttcctttccatgtttagcgcttccttcaggagctcttttagggcaggcctggtgggacaaaatctctcagcatttgcttgtctgtaaagtattttatttctccttcacttatgaagcttagtttggctggatatgaagttctgggttgaaaattcttttctttaagaatgttgaatattggcccccactctcttctggcttgtagggtttctgctgagagatccactgttagtctgatgggcttccctttgtgggtaacccgacctttctctctggctgcccttaacattttttcctttatttcaactttggtgaatctgacaattatgtgttttggagttgctcttctcgaggagtatctttgtggcattctctgtgtttcctgaatgtgaacgttggcctgccttgctagactggggaagttctcctggataatatcctgcagagtgttttccaccttggttccattctccccatcactttcaggtacaccaatcagacgtagatttggtcttttcacatagtcccatatttcttggaagctttgttcatttctttttattcttttttctctaaacttcccttcttgcttcatttcattcatttcatcttccattgctgataccctttcttccagttgatcgtatcggctcctgaggcttctgcattcttcatgtagttctcgagccttggttttcagctccatcagctcctttaagcacttctctgtattagttattctagttatacattcttctaaatttttttcaaagttttcaacttctttgccttttgtttgaatgtcctcccatagctcagtaatttgatcgtctgaagccttcttctctcagctcgtcaaagtcattctccatccagctttgttccgttgctggtgaggaactgagttcctttggaggaggagaggcgctctgctttttagagtttccggtttttctgttctgttttttccccatctttgtggttttatctacttttggtctttgatgatggtgatgtacagatgggtttttggtgtggatgtcctttctgtttgttagttttccttctaacagacaggaccctcagctgaaggtctgttggagtaccctgccgtgtgaggtttcagtgtgcccctgctggggcggtgcctcccagttaggctgctcgggggtcaggggtcagggacccacttgaggaggcagtctgccccttctcagatctccagctgtatgctgggagatccactgctctcttcaaagctgtcagacagggacatttaagtctgcagaggttactgctggctttttgtttgtctgtgccctgcccccagaggtggagcctccagaggcaggcaggcctccttgagctgtggtgggctccacccagttggagcttctagggtgctttgtttacctaagcaagcctgggcaatggcgggcgcccctcccccagcctcgctgctgccttgcagtttgatctcagactgctgtgctaggaatcagcaagactccttgggcataggaccctccgagccacgtgcgggatataatctcgtggtgcgccgttttttaagcccgtcggaaaagcgcagtattcaggtgggagtgacccgattttccaggtgccatccgtcacccctttctttgactaggaaagggaactccctgaccccttgcacttcccgagtgaggcaatgcctcgccctgcttcggctcgtgcatggtgcgtgcacccactgacctgcgcccaccgtcttggcactccctagtgagatgaacctggtacctcagatggaaatgcagaaatcactgtcttctgtgtcgctcacgctgggagctgtagactggagctgttcctattcggccatcttggctcctccccccaattttactttaatttgaatgacaaagataatatgtaattattaccactaaaagtaatattttttcattttcctaacttcttatgatttggaaattttgaaataactgaatgttgttatcagcttacacatcaaatacaagtaacaaactggaaaaagtatgtgtggtgtgtggcaatatgataatgaaatagagggcaggggtggagactttaatgcagttttgcaaaatctgattattaattgctattaatggagtttgagttagatattttcaatttttcagagaaattttcaatttgtctggctggctagattagtggtctataaatatataatgtagttatcacacttctagtttccttgaaaatatacataggaagggaatggttaatgaaattagagctacagatacttaatttgtagagagattggctcttcagggagatgaaagatatcttcaaatatttgaagtcacaagtgtcaataaatgtgtagacttactcagcttgactccagagcacattcacagaattaataggacttagattttggctcaatgtaagaaaataattttatcagagtgaaagctattcatcatgggttggcttccttgtgaaggtgtaagcagttggtgactgatagtttgcatgcaaaagatggccagatgaacatttcttaggaatattgtactttacatagaatttcttcatttggtagaatgttggattaaatgaaatcttaaattttcatcccattctaagattacatatttttttgttacccgagaatcattatttatggactaccaatgcttttaagcaaagaatctctagccacgatgtgtctgaggtactttgatgttcagatttggaatgggttatctcctcaacttatttaccacatggtcagtaaggactgacttaatctcagttggagccaccagcaagatgtctggctcaacacccaaaatctgagccaaaagttctggctaagtgtgatagattcatacgtgttaatacccacaaaaagagttttttagagttcaaattctcttctaaacataaaactgtagacacatttatttgagaaaggtcaagtagtttagttctagctcttggtcataccctgtaaactgttttggctgtaggcattaaaaatttttatgttgcagacaggaaaatttgtattatgattgcacattaagcttataaaattttggagctccctctttaagaaaaatcacaaatacaaaattaagaatgaaagtgaattatttacttagaataaatacattacaacaaatcacaaattgtaaaaaagctgataaataccacagaatcataaaatctaaaaagataatactttatttttcagctctctgatataataccctttttactatatacttttggctgcatactcttttaatatgtctccacatgaagatgattttgtaatatcattatctgtagagaaaacagaaattcagtatcttccatactatgatcagtttaaacatatcttttgttattgatagtttggaaaatatttttttcagcttcacaattcattactgataatgtcatatacatgtttagaattgtcaaatttgagtggtctccaacctttttggcaccagggaccgatttcgtggaagacagtttttccatgggcctggggcttgaggggtggtttggggatgattcaagcacattacatttattgtgcactttatttctatcattattacattgtaatatataatgacataataatacaactcatcataatgtagaatcagtgggagccctgaacttgttttcctgcagctagatggtcccatctgaggttataggagacagtgacagatcatcagatattagatcctcacaaggagtgttcaacctagatccctcatatgcgcagttcacaatagggtgcacgctcctatgagaatctaatgctgacgatgatttcacaggggacagagctcaggttgtaatgtgagtcatggtgagtggctgtaaatacagttgaagctttgcttgctcacccacagctcacctcctactgtgtggcccggttggggacccttgtcttatattatttataagttaaaggaattggaatagaacttaagatcagaaaatattagaggtaaatttttgttgacttcatgacaaaaatcagttggacttagccttaaaaatgcatttttatgactaacatagtcaatgtatagtttcaaaggcacatgacctgttattcctcaataaggtaaatatatttggttatatgcatttcccaatacaaaaaaatgtgttcagtttgagttttcttttcaacagtcgataaagggcaacataaaatcattagaggaataactactctactactcaatattttaactcaacatacatcagtaataaagttacagaagatttatatccaagtttcatacatgtatcaatgattaaataattaggttattaactcatcgagacctttatgaactaggttattaactcattgagacctttatgaactaagaattatatccaagtttcatatatgtatgaatagttaaataagtaagttattaactcattgagatctttattaactcatttagactttatggactaggaccagcagtgtatcgtctactgactagaagcagaaaggagatgagataacccttggagttaagttccagttttgtattcctttaggttcatatttgataatcttttctgatctggtacatttcaatttatttcgtggcttttatcaagcattttggctgtgttttctcagtgtttcagagtcctatttcataatgtaaatgtagcattttgatagtccatgttagctcatccatataaaatgctatttgcatcgtctcgtaaataacattattttaaaatatttagtgtaaagaagaacactttttaatgttaacattttacattacttactggcctacaaacaggatttatgctgaaacaattgactaattgcattcttggcacaacatgctgccagtaattcaatcatagagttgtgaagcctctttttttctttttattttctaccttgaaactgtaataaagctatagtctatgataaaaactgggggagaattataattcttgttgtaaaagtacagcaattagtccagatgctaggataaatccctagctaagtaggtccattcctaactgtgcttttcagaactgatagattaatctcgaaatacagtttgggttttattaaatcctcaagttcaatcccacattctgcagtaataattcttcatgtttattattttctctactcctcttaaacacttaaactgtctgtatgcctgttagctagataataaaaacaaaacaggcaaaaacacccactaggtcttgtttgtgcgtgtttttcatctatcaaaatgaaagtaagttaaccatctcaattccttgaaattttttgtttctagaaaaagtgaaacatttgatttgatactagcacttattttcagtaattctccaaccacctacaatctgccataatttatctgtccctgactaccctcatgtactcatttccctccttatactgcttagatcttgtgccttatattatgatctatcccatttataagctttcactatcttcccctctttcttcttggcaaaattaaaatacttgttcagtccagctcctcagcactagaatctgtgaacaagcctggagaaaaacattcagattgtatggtctcttctaaatttaataccaacaggaatgactgagcctttatcactgttcaggatctccagcccatttacattcctactgccctaagtgacaatttcattccttcacctcttcctcaaaaccccaacatcttcttccccatcctgtgtcttatctgaaaatcttgcttcccatttcacagcaaaactaaagtctatcagaaatgaatatccataagctcttggctcccaccacatttaccatggactaacatctgaatccctttaatctactttccctgctgatgctatgcacaaagtattttatcgtatgtaagccaatcttgctcttgcgattagaccacatttcatttggtcacctcaagaacatttatctagcaattattctctttgtcattctctatatttccttaaaataagacctttccattagcatctagtattttctccttttgacctaattatttgtttagtttgaatctatcttatattcctcaatatggtatagttctttgagtacaagaaacttctactttgcttgatcagcaagtttttgctggactataacacatgacatggtttattagcatttaaatttaacctcatatgaagttttttatattatctaaataaaaatgtccaataagtaaaaaaggagacattccagaagatcagtaaattgttgttgaataaatgaagagatagctcacaacaacttgaaatgaacttgattgtcaaaagtgagtatcagctcaaattaaaaagaaatgctacaatagaatttcatttccctgtagcacttagtcaaaagaaaaagagatattatttttgtaatcccagaggacacaaaacttaagtattgaaatggtttcacatatgcagcagtcattgaatctacgcatgtgcacacattcatacacacgttttcatttttgccaatagcccagaaagaatattggtgagaagagaatttttgtaatttttaaagtgagtcttgcagattctgacctatctccaaacttaagctgcatcacaaaagagtgcatagataaatctcttttctatttttgagcttattaatgtttgctgcctcatgttcccaaactgagcacacacaaaaccacaaaagcaggatgcattggggagggctgttaaaaccagctggtcaggaaatccatttggggtcagtaaactggctgctaatgacaccaaccaacaggaaaaaggtagagagtacaagagcaggacgtgcatttaggagtaaaatcaatactcgtatttgattggtgtgatactttttaggtaattgtgcaaagaaatcccaatatgtagtctcaaagtgccaacttcaatcttggtttaaaatacttagagaaatattaataggttatgtgagaagactactatatggaccaaaccttgtcttgacaatcttcatgtttatttaaaacaaacaaaaaccagctaacaattgcagaatttgttagccttttatctggttttactacgtttctcaaacacattggtcttatcaaaaataattttgtgacttttatatgcttttggcttttagtattttctggaagctcaatttttgtttcttttacaagcacaaagatgcttatgtaaagtttcaataagagaaaattctaccataaactaattgttttgtgagcacattatttaaccaccatgggactcagtttccttatctctactggtttgccaaatgtctgtaaaaatacagcaagttaatgctaacatctgtccagaaagtaagtctaacttctagttattaacatgaaattatttttctatcatcaactctttcaattatctaaataaatattatttaactctttgttgaccaagtgaataaatgaacaaattaactgtaaaattagaatcagaaaggcatataggaattttcttgtttacactattcattataatgagaattatactgccgtcttagtggaatagcttgcaaatatttagtttttgctttaataataaggaaagtttaaaatgttgaaaattctaataaccttagaaaaccaagggaaaattaatagttgtcatgcatcacagcaagtgatgtcagttatatcttaatttttccaatatgtgttgtgctcctatatatttataataaaaaatttacttcttatttctaaataatttcaaacttatggaaaaatagcaaacatagtaaaaaggactacaacaagattataattgtattaatccattctcatgctgttaaaaaagtcatacccaagacttggtaacttataaagaaaagagatttaattggctcacagctcaggatggctggggaggccttcaggaaaattacaatcatggcagaaggggaagcaaacacgtccttcttcacatggtggcagaaaggagaagaatgagagaccagcaaagggggaagccccttataaaaccatcagatctcataagaactaactcactatcatgagaacaggatggggaaaccggcccatgattaaattacctccatctggtccctctcaggacacgtggggattatgggaactacaattcaagatgagatttggcggggacacagccaaaccatatcaatagtaatacttacttcatatggttttagtgagaatcaagttactcatgtatgtaaagcattaagaactttagaaacaaatgagttgggagcaaaagtgcttataactaaaaaaattattcattattattaagtcttgattttggcacttgaacaacaagagtgcctatcttataggactattggatgcataaaacttagaaacccatggtttttccagtctaagctaatgacagcctgtgctatatatataataaaacttactgaaagaaatctaatcccagtgcctaaaattatttgagtaacactacaataaaataaaaaatccctacatatagttttttaaaacctagagtcaacaattatatctagtctttacattgtaggcttccctaagtttcacattgatagtgatcaatgtgagggtaagtttagttgatctctgctaaaatgaatgcagcaaattatttgatatttggaaaacatttactggtggaagaaaatgcagttaccttgtcattatatagaataagctatataataaaattttggtaaagagaacaaaatctatttgttaatctcacacttttcaaactggagtctttgtgcctcagggtgagggccaggcagggaagttgcaggtacaatgtgccaggagtagtcaaagccacaggagaaacatggcaagccttcctgaaatccaaattttaggagaagatgaagtgttatggggaaatgagatttcatattaaaacaaacatatcctaattatatacatatttaattccatgtatatggaattaaaatacacattttttcagaattttaaagtatgaaaactagttaaagcctatttgagtcatgttcatagaaatctaaggactatatattcactctcctctggtgttaggagtacatcaatcatcaattagtttacttgtgtaacaattatttatttaaggctaactatatgccagacactgtactatgctctcaatgcaaaagtgagcaatacagatatggtccctgcccttatggggcttacagtcaagtagtaggatgctttttttttttttttttaattaagctaacttaattctcctaacaactttatgaggtgaattctattagttattttattcatgttgtgttacttaggacataacagtgctttaaatacaacaagcaggattttcaaacacaaaataatgtgcagggatagtctaatttagatgagattttatgaggatgatgaggtatggattggaggaaagcgaggtttaatgcagagactatataaggggcagtttctagtgtaacacatggtgatggaaatagaattagagtgaagtggttcaatttgaaaatatacactggaggtacaaataggccttggatatggggaaatcacggattggatatggggaaatcacatgaggaaaacaaaaataacttcccaacttgaacaaatgggtatttgaacaatagattggaggagggcgatttaaggttaaagagaaatcagtttggggcatactaattttaagatatttctaagacatccaattagaggtgttcagttgtatatataaatatgtatacttatacagttgtatacaatacagtatgttaggacctttgggaaaaatatcttagctagagataaaatcttggcatcttgagtaacacagcattaaattaatatacgctagcttagattatttaaacttgtgtcctttattttatccagtgccccttttctaacatatttaaagctttggaaataaacatttggcattagtgaatataatttcatgcaacaaacatgtaggggatacagagctaagtccttcaggatttcagccattaagtagcacaactttgaggatagataaaaatgtgataaaacataatagatgacaagtatatcataattatgatacaaataaactgctgcaaaggtagaatacaatttataaatgtcagcctggatagtgattgagtatgggaagtaaaacaagaaaagataaagaatagacaaagagggacagagcagtaacaaaggaaagaagtccaggggcctacaaaatagctaaaatatattttccagaggcaagagatgttaggagtcatgcatagttggcagtgctgcatcagttgtcagactagtggaggacaatcataaagtcagagacactgtgctggggtaggctttaaggaaggaaaagtaggcccatgggctgggcaatgaagtttatttctatcgtaattatatgtcctgcatgtaggaatcatttctaattcctgtgggtcacttaatgaatctcatcaattttacaggtctcaagaaagcaccaacctgtgagccaaaggagccatcttaatgtctttaggtcattaattttatacatagcatgttctttactacaaggctactttgagagtcactgtgtcactgttgggcttctggcataaataaagttaacataatatactcaataaactctttcactccttagctaactccaacatcatccagacactgatgctcatccaagttgccatgtagatttataagaagaatcttgttaagataaaataactaaacataaataatactttaaattttattgccatgaaatggccaaaggtaggaatgtagcagtaaccccggaagagcagtccttagttctaactctttttcttgggggagtgacatgtaaaagcctcttcaaccagaagcacagtgcccttgagcagcaggggagcatatcacttatatctaaaagggaatattttgtcaatgaaagtacatgctaaaatatattatattgatggtcgtaaaaataatgttattagaaattgttttaaacaaacatttttgaaaatgaaaataaaaatagttaatattttataacttatatgaattgcctaattttttttaatgagaagaataattactgtggtacatctcatgtatattaatctgctgaaatttctgatatttttctgaagtcagctttttaatatgaatttattattcttaagttttaatgaaacttctgggaatcttcaaaattgcttgttatggttaataaatttgaaatattgacacatttaatatatataacaatatttttatttgaaaaatgttctcaaaaggggcttaggtatctgctaagaacaaattttgctaaattgaaaatattctttttattaattgaaaatatttttaattctaatgtatttttgcattgtaatgtaaaagtatttgagtccaaggtttttcacagacactgagctttcccccccttcatttagtgttccattatccaagaaataacttcataataccacacttgccaaatagattgcctaaatttatggcttttttaatggtttgccaaatttagatgcagaaaaattataggcctttaaaatcatatttcaatcctgcacagaatataaatatttggaaattagaaattacaccaggtgccacatagaatataaatagatcatacaattcagaactttatctaaagactgttctcacaaattaagatattctaaagtatgattatggaatctcaaaatcaaatcttatcctgtctttgagaatgcattatttcatttgatttgttcagttaatttcttgctttagtccatttcagcacattcttgtgggcttcaagttgcaagttttgttaataataatagctattccttaaaagtttcaagagctgaatactgggatgctccatttgtgaaatactatgattaaacatttccaagtaaatttgcaaaaaaaaagcacccaaagtttagaggacttatgtataaaaagttatttttcaatagtaagtatgagaaatgccaagaaaatatgccgattgctatgttaaagtattttcatttttttaattcaatatcagctttgtctccaaaattttgtaataaagtgattctaattataaaaatatttataaatcttgtcacctttatcttctattttgatttgtagaatattgcaatttatttggacccaatgtgaattatatttgcaccacaacaaattcagagtccatttctactccatacatttcttattgtgataagaatactgtttttagtgtaattatgttcagcaaaaattttttgtgtgttatcactgaaaaaataagtaacctatcttcaatgtcaacattttcaactaaaattgttatactttttacactattgtcagattttaaactttgatagaatgaccttccatagctttattttgagtcattgaattggattaaaaaatcaaactagtattgaaatatattaattttatgtttgaggcatatgataaaatgaaataaagtagccataacttaaatgtttataaaattattttctgctagtagaggcagcacattaacaactgttgcttaacttatggtacatatatttaagaagttgggagttgaatagaatgaacagcatgctttctgtcattcttaggttgttttgttctgactgacatgacctaaaagtaagtacatgtggaagaaggtcattatggaacttactggtaatttatttgcagaattaaatgaaaataatagtgataaataagggaatgcatattgattgtaatccaatctcttatgtcttcctgtatccatgcttttcggtagtgccctctcatgctgacacttggttatgtcacttgcttagaccagtggggttgtagcaatgttgatgtaagcaaggtcttgaaaaaatcttcacgtgattaatacggccattatggaaaacagtatgcagttcctcaaaaaactaaaactacaacttccatatgctccagcaatcctacttctgggtataaatccaaaggaaatgaaatcagtatgtcaaagagatagctgcactcccatattcattgcagcattattcacaatagccaagaaaagaaatcaatctaagtgttcatcagaagatgaatgaataaataaaatatggcatatatacacaataaggtaataatcagactttaaaaagaagaaaaccctgttatgtgtgacaacatggataaacctggaggactttatgttaaggaaaataaaccagacacggaaagacaaatactgtatgacctcagttatacgagggggctttaaaaagttatggaaagtgtgtattatgaaaaagttatgcatggatttcatgttttttgcaccagaataaacttgtagtaccttgttataacagctatgaacaggatctaatttgaggcactaaaaagaataagacatcagtttcaaaagagcacctatcagaaccacataaattctgcaaaaattgaagcaagaacaaacaccaaatttatagtaaaacttaggtagaaaaatgaagacatcattgatgctttacaaagttatggggatgatgctccaaataaatcaggagtttacaaatggacaatgaagcaatgttgaagatgaagcccacagaggcagaccatccacatcaattttcaaggaaaaaaatttatcttatttattccctaattgaagaggactgacaataacagaaacaaaagccaacaccataaacatctcaattgtgtcagcttacacaattctgagtgaaaaattaaagttgagcaaactttccactcaatgggtgccaaaaatgttgcttccagaacagttgcagatgaaagagagcagagctttcaatggaaatcttaaacaagtgggatcaagaccctgaagcatttcttcaaagaattgtaacaggagatgaaacatggctttaccaatatgatcctgaagacaaagcacagtcacagcaatggctaccaagaggtggaagtggtccagttaaagcaaaagtgaactggtcaaaagcaaatgtcatggcaacagtttttggggatactcaaggaattttgcttgttgactttctggagagccaaaatataatactatctgcttattatgagagtgttttgagatagttagccaaagcattagcagataaatgcctgggaaacttcaccagaaagtctttttctaccatgacaatgctcctgctcattcctctctgcaaacaggggcaattttaggcatccaccttacagtcctcacttggctctatctgactttttttattttctaatcttagaaaatgtttaaagccacccatttttctcagttaataatgcccctcccaaaaaaaagactgtattaacatgattaaattcccaaggccctgagttctttagggatgaactaaatggcaggattgttgcttacaaaagtgtcttgaacttgatggagcttatgttgagatataaagtttagagaagtagagaatagaatggtggttaccagtggctggaggccaaaagcgggggagactggagagatgtttgtcaaagcacacaaaattagacagtttgacaggagaaataagttcaagagatctattgtacaacataatgactagagttcataagaatatattgtatacttacaaattacttagggagatttttgttctcaacccaaaaaaatctgagtatgagaggtaatatatatgttaattagcttgaattagcagttctgcaatgtatacatatatcaaaatatgatggtttataccacaaatatatacaatttttgtcaattaaaaatatattttgtaatcctcacaaaaatgaaaataaacaaaattaatttagaagaacagtcatttgagctaaatgaaaagttatgattcagagtaatctgcaaatgtatcttttgtgtctccccaaaattcatatattgaaacttaatctccaatgtgatattgttagaaagtggcatcttagggaggtgattaggtcatgaggatttgccctcatgaatgatattagtgcccttataaaagagaccccaaagagctagttatcccctctgccatgtaagaacacaacaagatggtgccttctatgaggaacaagccctcaccagtcaccaaatctggctgtttcttgatcttgtacttcccagactcaagaattgtgagaaatagatgtctgctgtttataagctgcccattctcagatgttttgttatagcagcccaaatagactaagacatagctgcatgtgttaaatcatcgtatgtaggcacagccttcttacaataattactaactgaaatagatgctgatggtcctttaggagaactgtttctggttttcatttggttgtgaccaagaatatataagaaatagaaatttagtatatagtactttaattaaatatgtagttttaattttatttatttctgtcggaagggttttattgcaaagttagaaaatatttactaaacactaaaaaccaaataattattggtttataccacacagtaaatggcaaaatcagtgtagcaaggctgtctaactacaccctatatgccttatagcagggctggccagtctaatttcccaagttttcagcttaccctatcaattggcagcctggcagctttgtgaattttgtagactaaaacatcgactagataaatatatgaatggtccattgaatggtcagtaaaggagcagaatgggcatgagacaatttgtcacaaagatcaaagaagagaaactgagacagtctgtgtgcattccatcacctaccattttactgagatgaagttaatatttctccaagaatcttcagtttcttctccaatgtcaccatcctgatttccagaaattgcctcgtgtctagagcagccattttctttccattcatctattttctgtggtgatgagctgctgagctggtcccatgtttttgattaaggtgaataatctttgtgtggtcttccccgtctttagtttgctgatgggttgtaaagtactagttcagtttctagtgttttaagaagttcctgcttttgatacgtctttgagggactggctgtgagacccacttgctgccttgcttcaatttagtgtctaccaagcacaaagtggttttgaatgaaaactctataattaggcttggtcatctaggttagttggttacataggtgaaatggcttttcttgatgttgagctcgtagtctagccatgtttatccataattggacttgccttttgcctagggaagtatccaagtgaactccagagcatattgctgtatttagccatgacttactgctttccaaacactgtattctccagaaggtacactttgagatggtgatttcatgcaggagatttattaggaagtattttgggggccaacacctgtggaaaaagaaaatagagacaagttcagctgcaatacaatctcaatagaagcctctgctgaccctattgggagttctgaagaggtaatgagccttaccagctgtcctgaattggggtgaagtggccaggcttttataaccacatgttcatcagtcattgaatgaaggctacctatgaagagtgtgtaggctaggttaggcagcttttgtcagctgaggtcatcctcaaagggggctaagagctgagaggctgtctgctggcagcacacctagcatctgacataataagccctttattcctgacagggaatcttcttgcatcacagcacctacaccattgcccttggatacattaatagagttctcctattattggctttttttttttttttttttttgtgatggagtcttgctctgtcacccaggctggaatgcagtggctcactgcaacctctgcctgccggattccagcaattctcctgcctcagcctctgagtagctgggattacaggtgcgtgctaccacgcctggctaatttttgtatttttagtagagacggtgtttcaccatgttggccaggctgatctcaaactcctgacctcgtgatccgcctcggcctcccaaagtgctgggattacaggcgtgagccacatcgcccggccctattggctttttattcccaacatgctgagaacaaatttgcagaaaatcgaaggcaaaagtgcgtagggccctcaaaaatcactgtgcatctctgaaactttgataagcctacttttatactttgttatatgatataatgaatatctttattacttaagttattattattcagaattctgttacttgtaattgaaagtattctcaacaaatataaccaaacttgtacagccaaaccattcaatgacaaaataattaaccaaaaaaatcaactgttgacttttgatagaaaaactaaaaaaagcctctctgaggagataatatttgggctgaaatctgaatcacaaatggggttagccaagtgaggatgcaagaagagcattcctgttagggggaacaattgcagaatcctaaggcagaagtgaatttggcaggttcaaaaacatgattcttattaaagaatttggtttgccaggctatgatttaagatgtttaagatgctccagtaatgcttagggatttcccccacaaatatttaatatgattacaaacattttaaatgtaaagggaaagaggaacaagaaaaattgtcaaataaatgattatgacttaggaagaagaacatttgtgtaagaggttatctgcaattgtcagaagaaaaaaatacctgataaatatattgagaacaagatttgccttcagagatgtgtgtgtgtgtgtgtgtgtgtgtgtgtgtgtgtgtatgtgtatttatataaatacatacaaggaggtaaacatagctttatagcatcatcaagctgaattaaatgacaggagcataacagcagaaagctctatcactcttttaggaataaacctggtagaagtggaggtgtgttagtactgtatgccaagaagttgctggaaaatcttcagcagtgtggctggagaattgttggaaaaatcttcataaagacctatctccatttttacctgcataaagatagcagaaagaaaaaaatactgaaagaaaaaaagtaagattccacaggccaagattcttggaaaaatagatgactcaagagtaatagaaaactttcagacatgaatctgtgactgtaccgcatcaatgatgccaatttgcagatgtatttgctaaacttctgccagtaatcactgaggaattacagaaaatgggaaagattgtagtgtcagccaaggttcatggcagaagacagaagcattttaagcagcagagattaaatgctgtaaatgggtgcctgcagttacaggaaggcctggagaagtgggctgtactctgggctaccttgaatgactcccagacacccaagagctgaatcaccagggagctcccacctctgagagtatcctagaaccatcagatttccagaacatacaatcaaagctgagataggaaatcatagagctggaactatgcacttactgttgccatggctactctattatgctgtgaacgggggagtggaacctggagttcattggggactctgcttccactcctcctcttaaccaggaatctagagaatgacatgaattattgctttggaagaaaacctcacatctccacaagaccttgcttcccaaataagacatgtcagaagatgctgataatcctcacttctgcattacaaatcgctcataggtgcatctgcaggatcttacttggatccagagtgctagctgcaaaagcttctgggaattgtacacttaactctgaagttttatctttaatataggaaggtatgacatagaagagtcagatggaagttcagtaaaccaaaccacagtatccacacaattcaagacagccaaaagttcttatttctttagaggaagggatagcttataagagacacctcctgaactcaacactggtccttgtattggttagaaaagataccctgtgaaccattaagacagggtgtagtgatcactgggaatagggggtttgttaaaaacaaatcatacagatagtttattaaagtggtaagccagagaactgtatggctacagcgtatatatgtatgtatgcgtgtatttattatttttattgatatggggtggtctcactatgttgcccatgctggtcttgaactctcgggctcaagcaatcctcctgcctcagctttctgggtagctgggacaataggcacatgccactgtgcccagcttataatgtatttaaagtttaacaaagctttttgtctttttggaagatgtattttatgatgtcatgggatatacttgaaaaatgtggtcatgatggtggtacagttgaatgtatttgtaattagcagaaagactaaagaactactgattagcagatatgtgtccaattgttgcctatgctgtaggaattaatgctttatcctgtcctacataatgaatctgggaagaacattgattttaaaaatagtaatagccatcatttactcagtgctcactctaggtgaggcactatttatacattattaactcttttactccttacagcaagcttgtcaagttgttattctcttcattttaagtatgaggaaactgatgtcagaaagtgtaaatgacttgcccacatttagtaagcagcagggctgacattcatacctaaaattgctttgaggaggaagtaccagacagagggagaatgccacaacgtttccaggagaactgtctagctttttgcctgccaagaaaccccacagggtgggattttctcagttattccacatgagatagggggatggcccactgtcttgcatgatctggtcaatatctcagggactcaaacttacactgacaatcctcactaccatctcacatataaaaccagatgcccgttttttgaaattatgaaagatgtaacagtcaggctgaccaaatatagacaatattcttatacacatataaagtcttgattagtataatgttgaataagtcttgattagtataatgttggctgtagaggatcgaatcagcccaaggagactctgatcagaatgctaactggctgtagtttctgacaatcacaatatgaatgtgtccatctggttggctgacaggatctctagacctacatggaaaggtactttcttatttggccaagaagtgccagagtttgcctctccaactcccttatatgccttcatgactgattgccattctttcttttgatattttaataatttcagctaagttaattttggcttaagatttagttcttgtctttgaggtgatggatcaattttctgccaatacaatgacttaactttagacagtaagtttaattcctgtgtttccaaatccactgttgcccttgtatgttacctataagaaacatgcccacttggctctttatctgtgctgccattggtaggtgaaaaagaacaaacacaagcacagaagcaccagtgctgacatattagtgtaagagcagcacaagatttttaagagacagtattttaaattaacacaggctcactgtgagtcaatagggtgggatggagggagaggagccaagatggctgattagaagcagctccaggccgggcctggtggctcatgcctgtaatcccagcactttgggaggccaagatgggcggattacttgaggtcaggagtttgagaccagcctgaccaacatggagaaaccccgtctctactaaaaatacaaaataagctgggcgtggtggcgcatgactgtaatcccagctactcaggaggctgaggcaggagaatcacttgaacccaggggtcggaggttgcggtgagccaagatcgtgccattggactccattctaggcaacaagagcaaaactgtccaaaaaaatagaagcagttccagtcagcagctcccactgagaagaatgaaaacagtgagtgaatcctgctccatcaactgacgtatccaggttctctcactgggactgaataggcagttggtatgacccatgcagagtgaggaaaagcagggtggagcaatgatccgggagctgcatgggataaggggaactcccacacccagccaagagaggtggtgagtgactgcgctgccccgcctgggaaaccatgctttttccatggatctgtgcatcctgtggatcagaagatcccctcatgggcccacatcaccaaggcctttggttccaggcacagagctgtgccacctgcttgggttgcaaccagtagcagcaggctggacaatgcctaatacaaccgagtgcctggggaaggggtggccagtcaccatcactgcaactccagttggccattttacgctgctggtgtcagggagactgggtggtttgaactgagaggaatttcccatagcagcacatcacagtggctgtggcagatcgtggccagactgcttctttaggtggaacctggatccatccctcctcactgagcagggcctccctgcagaaattgtagcatctccagccaggggttttcagacagaactctgatatccctgggaaggagcccctgaggggaggagcggccacagtctcacagttgggggcacctagtctttcctgcctgctggcagtccagatgagggggattctccccagcacagcccaacctgctcagccaaggggtagtcagactggttctttaaacagttccctgatcctgtgcctcctgactgagtgagacctcccaacaggggttgccagacacctcctacaggagtgttctggccagcatcagctcagtgcccctctggtatggagcttccagaggaaggagcaggcagccatctttgctgtttggcagcctccactggtgatacctccaagtgcaggagggacccaggtgaactgggtctggagtggtcccccagtaaaccacagcagccctatggaagttgggccatactgttaaacaaaagaccccacaaaaaccccgtccaaaggtcagcagcctcaaagatcaaaggtagaaaaacccatgaagatttgaaagaatcaatgcaaatatgctgaaaactcaaaaagccagagtccctcttctcctccaaatgattgcagcacctctccagtgggggcacagaactggggtgagactgcaatggatgaattgacagaagtagtcttcaaaaggtgggtaataacgaactttgctgagctaaaggaatatgttctaacccaatgcaaagaagctaagaaccatgataaaacattacaggagctgttaactagaataaccagtttcgagaggaacataaatgacctgatggagctgaaaaacacaaaacaagagcttcacaatttaaccacaagtatcaatagccaaatagaccaagtagaggaaaggatctcagagcctgaagactatcttgctgaaataagacaggcaggcaaggttagagaaaaaagaatgaaaaggaatgaacaaaacttctgagaactatgggattatgtaaaaagaccgaacatatgactgattggagcatctgaaagagatgaggagaatggaagcaagttggaaaacatacttcaaaatatcatccaggagaacatctccaacctagtaagacagaccaacattcaaattcaggaaatccaaagaaccccggtgagatactctatgagaagatcaactccaagacacacaatcaaattctccaaggtcaaaatgaaggaaaaaatgttaagagcagccaaagagaaaggccaggtcacctacaaagggacacccatcagactaacaacagacctctcagcagaaaccctacaagtctgaagagattggaggccaatatgcaacattcttaaagaaaagagtttccaacccagaatttcatatctggccacactaatcttcataaatgaaggagaaataaaatccttttcagacaagcaaatgctgagggaatttgtcaccaccagggctgccttagaagagcccctgaaggaagcactaaatatgaaaaggaaaaaccattaccagccactacaaaaacacgctggagtacagagaccaatgacactatgaagcaactatattaacaagcctgcaaaataaccagccagcatcatgatgacaggatcaaattcacacataacaatattgactttaaatgtaaatgggctaaataccctaattaaaagacacagaatggcaagctggataaaaagacaagacccaacagtgtgctatattcaagaggccaatctctgtgcacagacacacataggctcaaaataaagggatagaggaaaatttatcaagtaaatggaaagcagaaaaaggcaggggttgcaatcctggttactgaaaaacagactttaaaaccaacaaagataaaaaaaaaaagacaaagaaggacattacataattgtaagggttcaattcaacaagaagaggtaactctcctaaatatatatgcacccaatacaggagcacacagtttcataaaagaagttcttggagactttcaaagagacttagactcccacacagtaatagtggaaactttaacaccccactgtcaatattaggcagatcatcgagacaaaaaattaacaaagatattcagggcttgaactcagctctggatcaagtggacctgatagatatctacagaactttccaccccaaaacaacagaatatacattcttctcagtgccactggcacttaccctaaaattaataatataattacaagtaaaacactcctcaccaaatgcaaaataagtgaaatcataacaaacagtctttcagactacagtgcaatcaaagtagaactcaagattaagaaactcactcaaaaccacacaactacgagaaaggtgaacaacatgctcctgaatgactcctgggtaaataatgaaattaaggcagaaatcaagcagttctttgaaaccaatgagaacaaagagacaacataccagaacctctgggatgcagctaaagcagtgtcaggagggaaatttatagctctaagtgcccactttgaaaagctagaaagatctcaaattgataccctaacatcacaactaaaataactagaaaactaagagaaaacaaaccccaaagctagcagaagacaagaaataaccaagctcagagcagaactgaaggagatagagacacgaaaaatccttcacaaaaatcaatgaatcaggagctggttttttttttttggaaaagttaataaaatagaccactaactagattaataatgaagaaaagagaataatcaaatagacacaataaaaaatgataaaggggttatcaccccacagaactacaaactgccatcagagaatactataaacaactctacacaaataaactagaaaatctagaagaaacagataaactcctggacatatatgccctcctcaaactgaaccaggaagaagctgaatccctgaatagaccaataacgagttctgaaattgagcagtaataaatagcctaccaaccaaaaaaagccaagatggatttacagctgaattctaccagaggggcaaagaggagctggtactatttcttctgaaactagtccaaacaattgaaaaggagggactcttcctaactcattttatgaggccagcattatcctgataccaaaacctggcagagatataacaaaaaaaagaaaacttcaggccaatatccctgattagcattgatgcaaaaatcctcaataagatactggcaaactgaatccagcagcacataaaaaagcttatccaccataatcaagtttgcttcatccccaggatgcaaggctggtttaacatacgcaaatcaataaatgaagttcatcacatcaaacagaactaaagacaaaaaacacatgattatttcaatagatgcagaaaagtccttcaataaaatttagcatcatttcatgttaaaactctcaataaactaggtattgaaggaacatacctcaaaatattaacagccatttacagcaaacccacagccactatcatactgaatgggcaaaagctggaagcactccccctgaaaactgacacaagacaaggatgccctctctcttcatgcctattaaacatagtaatggaaattctgaccagaacatcgggcaagagaaagaaatatagaggatattcaaataagaagagaggaaatcaaattgtctttgtttgcaggtggcatgatcctatatctagaaaacaccataatctcagcccaaaagctccttaagctgctaagtgactttagcaagctttcaggatacaaatttaatctgaaaaagtcacatgcatttctatacaccaatagataagcagagagccaaatcatgaatgaactcccattcacaattgctacaaagagaataaaatacctaggaatacagctaacaagggacataaaggacttctttaaagagaactacaaaccactgctcaaggaaatcaggacacaaacaaatgaaaaaacattccgtgctcatggataggaagaacaaatattgtgaaaatggacatactgcccaaagtaatttatagattcaatgcaattcccattaaactaccattgacattcttcacagaattagaaaaaactatttaaaaaatcatatggaaccaaaaaagagcccaatagccaagacaatcctaagcaaaaagaagaaagctggagacatcatactacctgacttcaaactatactacaaggctgcaataaccaaaacagcatggtaatgttacaaaaaaatgaaaaagatacatagaccaatggaacagaatagagaactcagaaataagactgcacgtttacaaccatctgatctttgacaaatctgacaaaaacaagcaatggggaaagcattccctatttaataaatggtgctgggaaaactgaccagccatatgcagaaaattgaaactggacctcttccttacaccttatacaaaaattaactcaagatggattaaagaagtaaatgtaaaacccaaaactataaaaatcctagaagaaaatctaggcaatactattcaggacataggcatgggcaaaaatttcctgatgaaaatggcaaaagcaattgcaacaaaagcaaaaaaggacaaatgggatctaattaaactaaagagcttctggacagcaaaagaaactgtcatcagactgaacagacaacctacagaatgcgagaaaacttttgtaatctatccatctggcaaaggtctaatatccagagtctacaagaaatttaaacaaatttacaagaaaaaaaccaacctcatataaagggggcagaggacatgaacagttacttctcaaaagaagacatttatgcagccaacaaacatgaaaaaaagctcaacattactggttatcagagaaatgcaaatcaaaaccataatgagataccatcttatgtcattcacaatggtgataattaaaaagtcaagaagaaacagatgctggcaaggctgcggatagggatgcttttacactgttggtgggaatgtaaattagttcaaccattgtagaagacagtatggcattcctcaaagacctagaaccagaaatatcatttgacccagcaattccattaccgggtatatacccaaaggaatataaatcattctgttgtaaagatacttgcatgcatatgtccattgcagcgctatgcacgatagcaaagacatggaatcaacccaaatgcccatcaatgatagactggataaagaaaatgtggtacatatgcatcatgaaatactatgcagtcataaaaaggaatgacatcttgtcctttgcagggacatggatggaactggaagccattattcttaacaaactaatgcaggaacagaaaaccaaacactgcatgttctcacttataagtgggagctgaacaatgagaagacatggacacagggacgggaaccagacacattggggcccgttggggccaggaagcagaggagggagagcatcaggaaaaatagctaatgcatgctgggcttaatacttaggtgatgggttgatagatgcagcaaaccaccatgtcccacatttaccaatgtaacaaacctgcacattctgcacatgtacccaggaactttaaataaaataaatttttttaaaaagtgaaaaagaatagtgtggaatgtcattattaaagagttccaggacagacttagctgtataaacaatgtcagaacaggattgttgaatgaatgagcaaaggaatgaatgagagagttactagctctaccctaatcttcagtaacactctatacccagagtagcaatgtttatttagcacaaggtccacattttcagagcatattgacacactggagtttattcagaggaaactgaccagatagtaacgggacttgaaaccacatctgacaagtgatggtaggggactggtaatatttaatttaagaaagtaaagacttaggggaaaaatgctaaaagctaagagttaagagtgttgactctaggccacgcattgtgtgcagccttttaatagatttcatatattatggttaataatggaaaggaaacattttattttgagttgccctggaaggcaggactaacagtcgtcagtggaaactgcagaaagataactctgtttattagaatgatggcatttctattctcaaagctgccgaacaatagaaagagctgcttagatataatgatttccatgtttttggaggtgggcaaacagagactggtgaaacttttcatggacatattttagagaggaatgagtattaaatgaaagtatggaccaggtgaactctaagacttttttcaaccttattctgtgaatctatcattttcttacagtacagaaattccattttttgcccctagttctgtggcatgaggcttcaatggtcaatgttacttctaatttagtagatcagttgtagtggattctggttttgcatttcctcctgacaactaagacaaaacccagcaggactcaaagtttcagggatgggtcacatattttgtgagtgcatcattaggtataatggcaaaaagagcctctctcactttctcatttgatctctaaactcatgtactctgcatatgagagaaatagcaccaaatatttagatagctttttcaaagcattgtaaattttcaatctcggtgtgaaagcttcacatgtgaatagcatttatttttgtctttgtatttaaatgcagttatttatgtttctaaaactctctgattgcatttcttattttgagctttgttattgttaatgagagtacactttgatcatcagcccaccagtgcttttatggcaattaacatcacatcttaaaaattggttcttagttgggtgacatagtatgtggctgtagtcacagctactaaagagactgaggcaggaagataccttgagctcaggagttcaagactagcctggggaacatagcaagactctgtttctaaaaaacaataacaaacaaaacacctggttcttgtgaatgggtatagaaaatgttcatttaaaacaaacaaagaacaatgaaattttatagctataaaaattaaatatcatatattaacagatgagaaattcaagctcagagagattaaatgacttgccatagtcacatggctagtgggaaatttgaatgcctgtcttacttctttattccacccactcactgaggcaattatatgctatattcttggcaagatctttttcttctcctttgccctcttctactccttccccccttctcctgtttctccttcttcccttcctccaactcttcttcatcctcctagcatgtagaatattcttatgccagtcactcatatctttacttaaagcctgattggcatgtgaccagagtagacagtatctaagattccgaaatagcattttctttaccagtatccttaatcaagtaggcaagagttctaaggaatcttttgttcttaattctgagttgctcttggatctctacagtgccgcgtatgatgctgtccttgacagaaatgtggccattaagaagctcagcagaccctttcagaaccaaacacatgccaagagagcgtaccgggagctggtcctcatgaagtgtgtgaaccataaaaacgtgagttttgttatttttaaacttctggcagtgggagtttgtaagattggaaaaagaaaatgtgtctgtacttgagtaagaaaggctttctttgctttgcaattcctgcctcttaagattgtttatcctgccaatatgctacattcgatttcattgtcctcatggtagctttctgcttaaaaatcacctaaaaaccatatgatgtggaagtgatgaattttataaatatttccctagttagaaaatttaccatatttggttatcttgctccaaattgagagcttcaagaaagaaacaagacaagcaaagccaaaagccagaaaaaaaaaacctacaaagcaccatgctacatttctttataatttagatttaatttagatttataatttagatttaattgccaacggttgagttttattcatgttatctcctttttatttcagctgtagcctggtggtggcctctaattgttcagtgaattcactgtgtgttggcatcttatttttttcaggggtgggcaagtatgtgagtacatatttgcaaaccacttgagaataggatcaagagctttttctcatcggaactcagctgggtagaccagtaaaggactttcttcatttcagaatctaagctccttcaatcacaggccaagacctctagaattctttctgtgctccacttcttcttaataaagataaataggagataattcattattttaataacttttattaataaataaattataataaatacatcaaatacattttagatataaatatataataaattataaattattataaataaaattttattttcttaaaaatcaaaagataacttcattacaagtaaaattattctatagtataatagctataataactctctacaaagttcttatgtatgaaaattacacagaacacattaccagtgcggttttataaaccagggatcttgtcctaatgctcgccatctaccagtggcactgagaagacacaaatgtgttagtattaagttgaaagatatttgaaatgcaaatatgcagattcgggccccatgacagtatttctcttttcctctgttactctaccctgatgattttttaattcagtcatttgacatgtatgtgttgaatgaataaaatgtgccaggaacagatctagatggtgaagaaaacagacaaattgctgcccatgtggagttatgctctattggcaagagcaaggcgatccacaataagacaggtcaatgtgtaaaatgtcaggtgatgataagtgctattaagtaaggcaaagcaaagaaggaatatttaaaaatgctggtcagtgtatggtgggataggtttacccttttaaataggccaagcagcaaaggcctcaccaagaaattgaaattttatgaactgcacactcatatctaatatggccatgcaacaaacatgagacttctagaaaggaatatagaaatgatagaaaggatggttcctatgaagagttatatactaatttgttctttcagtatgttaaataaaggtaagtgcaagattagccacatgatcaatgcaatatattctgttataccaaggaggatggagcataacatgggcaatgaaaaatggatggatacaagcaatgaatcaattgtatggaaagttttccatacatgtatttatatttccctcatcctcattccagaccctgtaatgcaatagaatgtggagaaatgctcacttacttggtcagtttgagagaatacttcccattcttgactgaaatgttggagactcatatttatgaagcctaaaaaagagttccagattgcagtgataatttataaatagcatcacacctgctaccttccttttatgtgtgtatgtatgtatgcagaagtctacagaaacacatttctggaactttttatgaagaggaaattcacttacaaccaaatgtaaatttcgcattaataagaacgtagaactgtgttaatactgtggaaagcaaagcaagagcaaaataatcccattaaatctttaataatagtgaagaaaatctgtttagaaaatacttctttatggtgttagtttggtcccctgttttctgtatttcttatcaactgaaaattagattaaaattgttatctagaaaaagaaaataaatattcaattccaggaactagtggggcctgacaaacatagattcacatctgtgtgtctcaagatgctggaataaaagaactgagattcctgtctggaaactgttggattaaaatggaaattttatagctgtgataatctccttctacagatgcctttttaaaattgactattggtaggaattagaatttacaagagagcaaatgaaggatagaagagaaattctcgaagagtaaaaagtaataaaacaaggtcataggaaaagggaaaataagaacatacagtagggaatagatcttgataaattaccttttaaaacaataaatcttgatttatttaaaattgtaatgctattttctatattttttaaattatctagattatttgttcactaagtgatctgggttagcatttttccatttttaagtagtgttcatgtgaatgtttgtgtggatgtaatgtgtgctgtatacacagtctctaatatttttgtttgaacaaatagcaaaatgaaataaattactttatgagattgataaagtcctagagaaacagacccactgtagatgttccaatgaaaggtgtacttcatagtcatttttcaacactcactagcactgagtacacagaataacatggcactttaatcacaagttataaagataattttaaaacaattttatttctatatgaatattccacactgcaaggttgctttagaagagatgatcttgtatttttaaaactatattacaacattgccatatatatgtatactagaaaatattggatggtactgtggttattttttgtcaataatttctcaatcagttaaaactacgtgagacataaaacattccatagaattgagtcaatttctcaggtgtttaaactaattttgttttatgtttattactccacatgtctttatatcatttataaagtttactgaaattcattgattgatgctttgaagctgcttaaatcttgaccttgtacttatctaatttttataaaatagttgcaactatcttgtgagtataagatttttatatatttttatattcatttcctactggcacgttagtaccaaatatttagctggaagaacattttgagttattgatgtatgtactctactgagaaatgtgacaaggggtttttacaaaatttgcttatactagaaggtagatttttttactagctgatatataaaataaagcaggaaacaaaaagcttttaactgaatttaaataactttaaaataattttctattaaatccatcattgatatcatctagaatgcacctttccccacacatattattggagcattagtttaatatttgagtgtgaggtagaagtaaaaaaaaatataaagtaacaacacaaaaaaatcatgaagtagaacacaactttgttcatttggagaagtatccccttgctaagtctcactgagtgttttactgccacctctctcctcacatggcatttcttccttttttgtttaatcccccgaaggcccatattctgccacgaggaatcacacttgaaagcagtgtaacaattatgcatctctctgactcttgcttctgcccaagaattgagctttttagctgcattattaacctgaagacagatcatctgttctttctgagcatacttttctgtgtcctctgagacagctcaagacatttttccaacttctccatttctgccatagcactagtgagtgactttgagttgaaatacaatttaaaaataatacattctctctcttttttctttctctcgtttcctctgtcccttccactctctttcagattattagtttattaaatgtcttcacaccccagaaaacgctggaggagttccaagatgtgtaagtaacaaaactcatgaaggaagggagagcacagcactcagatagcccaagggaaaatcacacaccacacacacacacacacacacacacacacacacacacacacagagttgaaatcccttatactgctcaaagagaggtaagaggtggggtcaaatgaaaggggtccagtgatatgtaaagaagattctgtttgtggggttacttcctggaaagacattctgcctccttttggccttgtggctttatatactttgttgttccatgctcttggtcactcagggaaggcttatttatttatatttattaatagattccacaaactttctacaatgagttaatttacctgaagaaatagtaataaggccaggcatggtggctcacacctgtaattccagcactttgggaggccgaggcaggtggatcacaaagtcaggagatcaagaccatgctggccaacatggtgaaaccccacctctactaaaaatacaaaaattatccaggtgtggtggcatgcacctgtagtcccagctattcaggaggctgaggcaggagaattgcttgaacccgggagacggaggttgcagtgagctgagatcgtaccactgcactccagcctgggtgacggagcgagactccgtctcaaaacaaacaaacaaaaagaaatagtaataaaagggacgtgaaaattatctttattctttctatctttatagtgtcattgattttgtgcaaagtctacccagtagtgacaacagatggaggagaggaagtgattccctagcaccttgtctttaatacagatacattgaatttaatggaagaagctgtccttaatttttttcttatttgaaattataatattcacaaaagagttgagggaatacaggggaaagtgaaagcaaaattaaggtaacaaatctgtggacatgaaccagacattaataaatgctttttctactagcaaccttttggtagggttcgtatagctaacacacatgcaatacctggaaatgctcagtcttgattaagtcaaaggcagagctaagaagttcagaagacttacagagttaggagagcattctgactaaatcaaaggacttcatagatcttgtgatctggaactaacactgtggattcacccttctagttacttagtaatggaactgatggatgccaacttatgtcaagtgattcagatggaattagaccatgagcgaatgtcttacctgctgtaccaaatgttgtgtggcattaagcacctccattctgctggaattattcacagggtaagaacaccttctctaggattacaattcaaatgctttaagaggaagagtaactgtagattattttctttatacggggggcattggtcaaatataatatacttcctcatttctttgatactagaattagcacctagttcactaattgtagaaggaaattctagttatattgtagttgagtttgttcaatgttatgttttggctcattgagatgcagcttcttagaagcctcatgctttcagctccttgattggcagaagtcatatgtgcaactgaaataagaaaattcatttccatagatgtttctggcagcataaagacagcttccctgatctgttcttctgtcaggcctagaaatgatatatatgttgaaagatttatgttgtcctaaggagaaacctaacagaagacaataaatatttttttttctaaaacctcttcccaagattagtgtaaattgtgaaaatgataatacaattcttttctgggattaaaacactttccaaaaactaatagttaacttatttgtagcagtaatcatttgccttatttagagctctgtaggcaagggggacctcatcagtgctactgcaaaatggctatgttgattgagtcaatggaaataacatttcacttgatactggcttttaattttttcccttatccttactgttaggatttaaaaccaagtaacattgtagtcaagtctgattgcacattgaaaatcctggactttggactggccaggacagcaggcacaagcttcatgatgactccatatgtggtgacacgttattacagagcccctgaggtcatcctggggatgggctacaaggagaacggtagggatgcttcgggagagcagcatcaaaaccatgaatgaaacgggtgcacgttgtagatagccaaggggaatgttctcttttatgtacatgcttttataaagtagggctgccagatagcatattcagggttttttttaatactactggtaagaaacactcattaaaaatgtgaaggatgttattgagaagtcagttttgctagaagagcactaaatgttaatagtgaaaaagaattgtaaatggagtctgattaaacagtcaagcggatgctgattagcacacgtgcctagatattgagaaaaattgctatttgggttgcagctcagctgagcatgagtgtgaaagcagaaaggaatctaccacagttagccatgtggcttttatgttgtatctcagactgatggctgtagttctagaaaaagacaagcaaaaaagtgacacaaatccttagagtgaaaatcttcatagacaactttgaaataatccaaattatttaaactgaataagaatttctgtaataatttaagctgctctgtaagaaacatttagagtagcaattgcctaataaatccttatatattccaaaaatcgtaaaaaaggaaaatgtcaaatttgacactactgctttcataaagaaaacttaatgttcatgaacactttaaaatgaaggctatggaaggaatcttaaaaatgtatcacaattgagtgtagttgattaaaactaaggatttattaaatatgttagaaagcattgcaatgtattattttgatgagactatatcttacaagtaatgcaccatattgaaaacatattcaatatacttaggaattaaaatagttttaaattaggattgtatatgtattcagtgtatctttaatatttatttttatattctattctatttagtttttagcagtctgtattaataagttttataaaaataatcagtgtatttttatgtacaggtgctacagggtacttttgtgaaaattccctggccactgaagtttacagaaacttctttgtatactcttagattagaagacagataatgtatgtatgcatttatacagaggaagttaaaaagtcacctcttacaaaggtcaggttcaccctggtgggcaatatcggagttctggtaccttttgactcagaagagatgaatctagccctccttgctaggcaataccacatctaatttattcagaaaagaagacatttttatactttcttcacgagttatttttaaaaagtcaaaggagaaacaaagtcaagaatcaagaatgtacaggagactggggggtggggcggtctgaatttgcctatttgggctttcagatcttggcactaccaatagctggtattaaaatccctttcccttccctcactagaaggaattgcaagttgctgccttaggtttttgacttctctaagtccatggaggaggcctgcctagcaccctggtgctgccctcccaccaatgggaggaaggttatcatgcagaaaaacctgcttgctcccacatcaggcatgccctgctgtcccctgcacctagccccgccttccttccccatggaacaattcggccaaatgattctgcccaaaagttccctttgtccataatgaaaagcaagttggaaaggggtaaagattggtaagagaaggcaaagcatgttttcctaacaagtttgacaatttggaaataaatatatgtacataacaatttttaacacctttaatacttttttcactttccttccagatgactcctttatacatgtgctaattcatcatatgtcttttttcttgaaatatttcaaatggaaactaaaactgatgtttatttacaagaataaacttctgaaggaaaagctaagtcccaaataccaggaattccaattcttttgcctctaaaccatggttccagtcatttcctggtttattggatttggttgaatttatcttgttttgccccggccccctggccccctgaaaaaaaaggtggtctcttgttgccctattctctgtaactgaatagaatagaaaatgaaaatagccaactctacaagttaatattgttttctatgcatccggaaaatgacacagaaaaccctttggtggcttttagctgtcacctgccatggagatacttttggtttagctattgcttttctcagtcaccaatgtcaccactttgtggcactgctgagaggcaatgtaaggcacccacaaagtaatgggtttttaaacattaatttgagttctcatactaaacactgtttatgtaatagcatagcgctggtttgaattcacattttggccaacttttggtgggaggtgaaaattgtacttttaatcaaactgttctttttcctcctccttcagaagtcaattatcttagttaactttactttcctcccttttcttcactaccctctctctcctgttctagtggatatatggtctgtgggatgcattatgggagaaatggttcgccacaaaatcctctttccaggaagggactgtatccttgtaccttttgctacagctttacctgttttgttctctctcccttttaaacacataatgattttaccaggagagtaaagatagaagcaaaaagttgggtaagtggtgttattgtaataaaaaagtgataatttctataatctgaccagtactgaagactgcctaccacaatgatttcttttaattaaatttcaatgggcttttttcttctaaaattactttcttgcctgcaactaaaaatagaaatgctatttttctttaataacaaaggctaccagatcccaaatgattaaaatatatttacctttataactagcaaaataagtcactatttgcaagtcattttccatctcctttctaaaactattttgtgcttctacaatatttaggcataataattgctctccttgctgacattctaagcttctgtctatggctttgttgatttaaattactcgacactaaatcaagtctttaacaggtcaatatagcatatcttcctcaaaacatgaacttctgcatttaaaaattgtaattattgttcaagttgctagtggtcaggtgagtttaatgtagacttctctcacctgacttggagatgtgacatagacatacatgcttgttttcccaactaaatttataatttcataaagcaatttggatttaagttctactactgagtcctgcaatagagtccatcagaaatttcttgtagagctatctatgatttggaattatcaaatgaactgatacatttcttaaatggccaaaaattcactctctagtaaaggtacagatttgtgtttgtaatatatagacaataaagtttacatataatagtataatatacttttaaaaatacaaaaataccttactacaaatactagtgcaaatctaagtacaatcaccattgacaactttaacaattataatacaggattgaatttagtatatttattacatatggatgttttggaaattggcaataaccatgtgacccataactctattaaccattctatttgattgataagaaagttttattaaggaatccttctattatgtaagaaaggttatgatttttattgaggtgtttaaaaagtccaatagtaaaaaacaaaaacaaaaaaacctgactcaacaagaagtgggtaccataataagcttgtatttaggtaggtatgtattcattctgctggatattaatgagatagtctctaaaatccactagtaatgtaagagtgatgacatattctagaactgcactgtctagtaggtagccactagccacatgtggttattcagcacttgaaattatagtctaaattgaaatgtgttttatgtgtaaaatgcataccagattttgaagatatttttaaaagcatgtaaaatatattactaataatcttatatagcttgtgttaaggtgatagcattatgaatatattgggttaaatatatatatctttttttattcttttgaatgtggacattaaacttaaaactacgtatatgattggcatttgtgactgtcatttttctattggacagtgctggtctagaagataagaaaaccacatggcaaccatttatttataaccaatcttaaggtcttgaatctctgtttgctccatgttcctttcctatctatagtgtgaagtatcattttcaccattagatttcatatggctacttaggaaaatttatttcactttacttatctatagtttggggattaattatatacctaatatagtttatttgaacaatattatagtgcacattcatatttaaatgtgctgactttattcaaaagtaggaattattttctttatgcttttgcctttggtatataacacattttagacaaaaaaggaacctctcaatcaatactcagagtgaagttgcacagccacatctctctcatgcacttgtcagtggaaagcaaaaagccacaggatttctcatttccatgtgacattttgttacatgtcacttgatttcatgtagcgaggttgttctctgagatcttatttagctcttcaggcatttatgcggattgcttttcttctattttgacaatattaaatttaaaagccaataaaagagaaaaaaagcaaaaagttttaaactcaatctaacccttcagaaaaacaaacaaaaaaacaaagcaccatattgataattttattttcttttaaaaatttttctcttggaggtgcccctcccaccttttttaatcctagtttgttttagaaaaatttttggagctgaaattaaattgtgtgaaaattaatacataacatttatatccttgatatgtatgaacctagacatttaaataatctctaatacagataatgtagattataataaaggtttgcatttattatataaatatatatatttctttatctcaagtgatgattacatagtacagcagtctttgatagcctagtgccatatgtgataatgaccctgcatgtggacctaaaagttaaaaaaaattgcataaagacacctacaatggaaagccttttacttaagttaaattttaccaaaaaatgagtagatattttccaatgaaataggttagaaaaaatgtttcctttttgaaaatgtttccatttggatttcttagccccttttacctataattaaaattataacttaatgtttaaagttatagttacatttaaaaaataaacctatagaaatctcagttaaacaatgtgctttgttaattttgagtagaattgttttattaatctttaaatgaaattattatcattttatgcacaggacttcctaccaacaactgagcagtcagataacctctcaaactatgactatcagacacaaggctgagggctgattcaagttatttatcggcagaagaattacacaattttaagcatattgaaattagtctaacatttattggaagaaatatcaaagctaagtatatgctaattgataccttgactacttccaggactctgcagaaatttcaaaaaacaatcagaggttctcatgtctttcacctagaattattcagagtaatttatattaaattactttgaggctgaaaaatgatgtgataatactatcataataatcaacatttttcttctctcttcacagaacttttaaacttgaaccctaagcaaaaatagtaaaatgtcttgacaaatcagagaatcttatgaaattgtcattgatgactgaagtttaactactttcccacattcaaactatctttgcattttgagaaacatcgtgggggtttcttggtggttgatatgatctagatgatatcacagggaattgtcttggttactgaattagaatgttggcaaaataaaattgaacaaaataaacaatacatatttgcttttccacttattaatttgctaattactttaatatccagaggatcacttcttaatacttatttttcttgtgtaaagtgtttcttaattatgcatacactatcatacacttaattttcactatagttttatgattaaaacatttcatagcatatatttttacataatgtagtttatttgaacattataatgcacattcatatttaaatatgttactaaacattctttaaacattcttaaacgcatgctgactttcaagttagagagtagtaaataggccaagtccattatttttttttatgtagtccaaagaacagataaaagaaatcagtgactttagcttcactcagattttgttcctttcaataaaatttacaggaaagcagctttacaatgcttccttagaagttttttctaagaactatccagtcattcactgcctccaccaccccaaaccccaaccaggacatgccatcttgttgattatcaaagactcctatagtcccagtataattttcatgagtcctttcctcaaacctgcttcttttagatacattcttcaaccttattttttccattctacttcaaatgatagcaccttctttgagcaaaccctgtgatgtccctttatctaagttcttggccaatattctctggatataaagttaaagacaggcatactgcatgcatttgaaaattctggacctcaagtatattatatccaaagctaacagctggactgctaaaatagctcctcttgcctttccctctgaagaacaggaaattgcagttagaatgaaagagatatacatataaccttgccaaggagccaagttattaaggaataggtaaatggttttccaaaagtatatttgaagaaataagaaaaacaccctcaaattaactgaatgctgtatctttttaaagtttgaatatgaacattaggaaggatcaaagtaaaatgaacaaaaatttgtggttacagattgttatatcaatctagcacagagatattttaaaattcttcttacctctttgaaataatagtgcttaattcctaataaacttttgcaactaacaacttactatatagtctaactctttttcttagaattaagacaatacagagttatttcaaacaatataaaatttatggttttaaataaagttaggatgaaacaatttagtaggcattctttcaaatctataagcaaattgcatgtaattataaataaatatttaaaaataaaattattatttgaatttgtttaaaagaatacatttttaccactagtgtgcctgctaactcttctcttttgttattattttatgaaaatgtgaggcagggttcaccagaatgggagctggagattctgaggttgtaaagaaataaaagcaagtttaataggtagattcaaggagaaagtctttttctgatttcctggcattacaatatttagcattaagttctgcgaattgttgcttatttttcttacttagattcacatgtgcaaaatatgtacattcttagtttatttatgtatatcagtggtcttttagaattctgtctttgaactgaagtttagtacaaggtccttttgttaaacaactaaatttatgacttagttaactaattttaaaagaaatgttctaattttataactgctaactttataacttataatttttataaaaattataacaaataattttcaaagaaatgttctgattttagaaaactatattaaatcttcttgctattgtgtgttgagtcattcattgagagaaaatttgtctaaattctacactaaatgaaaatatacttaggtgtgttaaggagaagtctcagaaattgtgataaaagagttacgtaatcccccagagaggaaacattttccaggatagaagctcacatagtctcaaaattatttaattgtggatcataatttaagctattagatggagtgtggaagtagcaatatagttctttatttatttagatttaacttccagggcttacattgtataatttctatctcttggttagaagtagaagaaagataatttattataagctaatttctgacaaataatgtgacatgagattttcagaggttctcactctgaaaattaatcatattttggtaacaccaaaatttactcaacatttcttctaaggaaagtgactcagcatctgattgttacagttgcaagtgaatctgccttctgcctatgggaatgatagaatgatgatgaaagaatgtgatgaatcagaattttaaaagccaacagaattctaccttggcagcattagtgtacagaactcttacagagacccagatgctgtatcagattgtttcagaaagcataaaatgcagtttccaacagtgattgaatttgctaattacttctaaggtctatgcacagtccctattcattgtaatacctgacaatttcataaaataatctattcttaacttcattagcaatatatatatatatatatcactaatatattcagatacatattgtattagtatgtttatgtatcctaatatagagatattagtagagggaaggcttactactactaccttcctgttcaataagagttggtatcaaattcttttattatacattttctgttagtggagatggcaaattcatgaagtttggtacaatgagtttatcttgagccataatcctgtcttgaatacataaaaatctatataaatttatgtgcatatattcaatttttgtaattcaagataacagagcttatcatttctaggcacaaggcttagcattttggtagcatagatataaatattctctaggaatagtgaatggtgagtaaagttaaaatgggaattagaaagatttccaggatattatcacccataaagatatattaaaataaagaaaatgaaattcaatatgtacatcagaatttcagatctagagcctacatctctgcattatttttatgcaaaagatttgtgatctattaaatctattttgagttctgcccatgaagatatatattttaaataaatattcttcttttacattggagtatctcccagatcccccacaccaaaaagagaactgtgagatataccagttattaataccagttattaaatcaacaactgggccaggcatggtgtctcatgcctgtaatcccagcactttgggaggccgaggtgggcagatcacaaggtcaggagatcaagaccatcctggccaacatggtgaaaccccacctctactaaaaatacaaaaattagctgggcgtggtggcgtgtgcctgtaatctcagctactagggaggctgatgcaagagaatcacttgaacccagggggcagaggttgcagtgagccaagatcgtgccactgcaatccagtctagtgacagagctagacactggctcaaagaaaaaaaaaaattaacaactgtatagaaccaactggtgctaaagcaacatagagaccagaatttaatttaggccatctgttgttattgttgttgctgttgtttaaaggcatgtgaagaacagcaaaaaaaaaaaaaaaaaaaaaaaaaaaaatcaagggattttagcctgaaagataaaattggccagttttaggagaggaatggttagggattacaggttatagttacatactttaaggttcttatttggatgaggaaacacagtagttcctgtttacatagtgaagagaagttccatagagtcaatgtgagtcaatatgtaggatgcctttctaagtggtttcaacaataaaatagattgcctagtgagtggtgagattcctccactggaaagatttctttattatagatgtaaatatataatataattatgtaaatttaaaataaataaaccttttccaaagatatttaattcccaaatataattttaatatattatttaatacatgatgatttgatatgtaaataatatttattggggacttgctatgtaccaggcagttgtgcaaggatctttatcagacataactttttcaagtcttttataaaactctacataataaatacagcttatcatcaatattttaggggataaaattgaggtttagagagaagtaacctggccaaggtcacatagttggaaagtaatagaattggttctctagcagaaaaagatgaatatattgccagagatattgtaaaaaacaattttatactaaatgagaaatagaaatagatgtttcctaagtcccagacaggttaatggcagaaaccattttttttctaaacatttgaatggagacaggcaagagaaaacactgcatattgagatttttggtctcaatgttttttgtatatctcttccacaatatctataaaatatagataatccataaatagcaatttagtcaaactggtctctttggacagtatgataggaatacttggaatttaaaaataaatatgttttccgtttttttctttaatcaaagatttctcaataccatcctgttgtgagacagatattacttgaaattacaaacacgttaataataaagggatgcacaactgtttgctctatctttccctgatatttctgcatgtcagttgctttcctaaactggaagcaaaacaaatttgcttctttgggtatgcttatcaccttcaaagccgtaaccgtttctttgcagtgatcactttgtttaggtgttaaatcaaacaatggaaactttgagtttaacccgagtgagattttcacattggaatgaatctcatgaggatctctttaaggtcactgccaaattacaagatgtaatttgaaaagtaagtggagcaaaattatattgtgctgctatcttaatgcctttccctatttgctcccccccagcatccctaattcttctgtttatttttccccccacaagaatgccctctctttctgatttttaagtacaacaagtgagtaaccaagtgtagctcaagagagagatttcactttcttgcttcacccttccccattttgcccctccctctgtgcgctctgccctggcttcctggttttaagttctggatgatacttggcaataacagagagaccattataattccaccttgaattccaggtttcttttgattcacagtttcagaagaagtatcagctctttagtcatgttgtttatttcacattgagcgatcccattttgaaagccagcttttcttatcattataaggcaactgtgtttataagaataagacaaggcttcctgctgagaaacatgctcctttgatgagagtcaatgacactaagacaacatattctgaaacattcattcttgaactggcttttcacttctggaactgtatttatatttataaataagggtaaatgtgttttataaaagaaactcttttgaggttgctggcagctcagcttttcttttttcttttttcaaatacgtatacaagagtaaaaaagaaactgatttgcatattaacactatctagaataatttatgataaaaatcagtaggattctagtaaatgaatgcaaattagaccttttaaatcaaaacctaaattaatcattgagttataattgcaaagtaatattattctacattaggtagcattgggtagtgttgttatttctgttatatgacagaaaagggccttgagagcctatgttctcccctttccaccatttaaaatgctaatgatcatgccactggcctctcatccagtcagtgaaaagtcagactattgctctatggcatgagtagcccagtgttttcatttatttgttgttctattcctgtgttcttgtttatcttcatttcatttttgttttcagttgacatgtggtcagtagggtgcatcatgggagaaatgataaaaggtgcagtgctgtttcctggcactgatcgtatccttcttagcagccagtggtatctatgggtgtcactctcaattaattcccttttgtctcaaatgcagtactgcttatggtatttgttcactgtccttagagagtttctatgagactcaatgtcaaatatttacaagttggcattatggcagagtaactttgtctcctagtaagaccttatgtggataatacagtaacaaatatgaaagagtcaacctgatatcaaaaggtctgccttaattcagttctaccaaactgataacattgagtactcttctttcttgtttttgttgtagatgtttcaaaatgaagatatattcatagctagataataaataaagtctttcagttctaagactgaagatttatactttgatataatgagaaatattcatttggcatggaaatttttatcagattcatgttcctccacaaatactaattggtttattttaacatatattcagagagcatggatgtgaatttcattttacaattgatcaagtttttctaaaattatttttcttattcactccatttatgggaataatagctctaattccttctcttattttctgcatattattaacaagtgcaataattaaaacctcattaataatggttatataaaatatctgaagaaatacattgaaatcacttgaataagtaaaagtgattctctcttaagcagcaaataattaacaagtaaagatcaagaccagatgtggtagctcatgcctgtaacccccaacactttggaaggctgaagtggaaggatcacttgagcccaggagtttgagaccagcctaggcaagagagcaagacccttgtctctacaaaaaacaaaaataaaaaatttagccgggcacggtgaaagtccctgtagtctcagcaacaaagaaactagctgggaggatagcttgagcccccagtgtcaaagctgcagtgagcagtgatcgtgctgctgcactgcagcctaggtaggcaacagagtgagaccctgtctctaaacaaacagacaaacaaacaaaaagattccagaggttctgcagtattaaatagatatgaatagtgtgcgattagtgattagtatatggatgtgtcatgggtcctgttaaatatccctctacacttagtcacttatgaaagttttatgtcttcatcctactaaaggtaaaacctctgctttaataaaacacttcaaaaataaaattgagcctataataatggggttttaatgtgtaattagactaaatctaattactaatatagtgcatccataccatattatgattagccatttgcgttgtttctaatatctacattataattttttatcaaatgtctataatgtaatatacacacttgaggattaatatttgtatctggttttacatatatgaatatatatatatggcttcatacatatattctctctacatattaaaagaaaaagttctggaaatggctgtattaggcactcaatttttgttggaagaaaggacttaaaatacttcagttaaaaatagttacactgtttttacttctgattattcttactaaaaacttttttctaatcttctgtttgacacacattttaaaaagtctttctgtctatagtgctgttttgtcttctaaatatacattttattaaatgacgtctataatttaccacatcaacattaatgctatttgaaactagctggctttataaaaactgaattccttcagatttcttaaaaatcaggagggattttaaaaaacaggacttcttttattcccaatgaattataaacttgtgtttggcctttgggcatgaatatgaaattgtctttaagttttggctgattttagataatttgatgaaaatagactcaatttgttaacttagtactctttgcttttccagaagttcattgtggttgaataattggtgactaaaatgaatatttgccacctgtaaattaaaatgagtgtttttatgatctttgttatgtttctattaagaaaaattaaaacagatttctacaactgaattaccaaatacaatttaacattttttagaatagtttcttgggaaaagttgctcgtgtgtcattttttaacttgggtgtcaaaattccttgtaaacaatgctttagggctcgggtaatgtggcagtatcctgttcaaagcccttgatatttggatatgaagtcctttatggagctcttgtatggggacatatttgtaaatttcttggaggacaaataggaatcattttctaaagtatgtcttctgatcgtgggctgtggtctcaatgatttcaaacatgttggttaaagttttaaatcagtcttaaagcaaacaaattttgaacactgaatatcaaataattaacctcttaatgtataagacattactgatttaaaaaattctgttattagaaatgagttactgaaaatacaataaaattatacctaaatctattaaatagagacattaaaatagagctggagatatgccatattataatgtatacctatatagtacattataaggagttatgttatttttagtcaatatatcctcatttatataaaagcattctcaaaacaatgatttctaaaagctcttggaatatgagctatgcatgactttttttaatttttaatttttctgggtacataatagctgtgtatatttatggggcacatgagatgttttgatacaggcatgcaatgcataataatcacatcatggaagatggaatatccactccctcaagtatttatcctttgtgttacaaacaattcaattatactcttttagttattttaaaatgtacaattaaattattatttactgtagtcaccctgttgtgctaccaaatactagatcttattaattctttctaactttttattttagccgttaaccatccccacccaccacctcctctgctatcctttccagcctctggtaaccatccttctactgtctatctcgatgagttcaattgttttgattttttaaattaattttaattttaagttccagggtacatgtgcaggatatgcaggtttgttacacaggtaaacgtgtaccgtggtggtttgctgcacctatccacccattacctaggtattaagcccagcatgcattagctagttttcctaatgctctccctccacccacccagctcccctgacaggccccagtgtgtattattcccctccctgtgtccatgtgttctcattgttcatctcccacttgtaaatgagaacatgcagtgtttgtctttctgtgcctcgcttatttcacttaacatttttaaatgtaccacattttctttatccattcatctgttgatggatgcttaggttgcttccaaatcttggctatcgtcaacagtgctgcaacaaacacggcagtgcagatatctcttcgatatactgatttcctttcttttgtttatatacccagcagtgggattgccagatcatatggtagctctatttttagttttttgaggaaccacagaactgttctcctagttattatgataatttacacttccaggaatgtgcaagtgttcccttttctccacatcttcaccagcatttgttgttgcctgtttttggatataagctcttttaaccggggtgagatgatatctcattgtagttttgatttgcatttctctgatgatcagtgatgttgagcactttttcatatgcctgtttgttatttgcatatcttcttctgagagatgtctatttaaatcttttgcccatttttaatcggattattagatttttttcctatagagttgtttgagctccttatatattctggttattaattccttgtcagatgagtagtttgcaaatattttctctcattctgtaggttgtctcttcactttgttgattgttttctttgctgtgcagaagtttttagcttgatatgatcccatttgtccatttttactttggttgcttgtgtttgggaggtattactcaataaatttttgccctgaccactgtcctagaaaatttccccagtgatttcttaaagaagattgataatttgaagccttatatttatgtctttaattcatcttgattggatctttgtatatggtgagagatagggatctagttttattcttctgcatgtggatatccagtttttccacaccatttattgaagggactgtcttttccccagtgtatgttcttggcacctttgttgaaaatgagttcactgtaggtgtgtggatttgtttctgggttctatcttctgttctattgatctatgtgtctgtttttatgccagtatcatgctgtttggttactatagttctgtagtataatttgaagtcaggtaatgtgatttcctccaattttgttctttttgcttaggatagctttggctgttctgggtcttttgtggttccatataaacttcaggattgtgttttctatctgtgaagaacaccattcgtattttgatagggactgcattgaatctgtagattgctttgggtagtatggacattttaacaatattggtttttccaatcaatgaatatgtaatatctttcaattttttgtttcctattcaatttttttatcagtgttttatagtttttattgtagagatctttcacttgtttgcttaagttacttcttaggtattttattttatttgtagatattataaatgggattacacttttgatttcttcttcagattgttcactgctgtcatatagaaatgctactgatttttgtatgttgattttgaatcctgcaactttactgaatttatcaatttgaatagttttttgatggagtctttgcttttgcaagcataacatcatatcatctgcaaacaagagttacttgacttcttcttttccaagttgagtggcccagaaaggcggtccaagagccaaatcttgaaattggtaactcaagagcctgcttggcactctacccacactgtggccaagctggtacctaaggtacaagacaaagtcccctttactttccctctgcttttttgtctcgccccatagtcaccacaactgggaatgtgctgagtctcacctgaggccagcaagtctcagagtttcacccaaggccctcagcatagtacctgggtatgctgctggttattcagggaccaaggactcttcagttagcaggtgatgaatcctgatatgactgggtctttctgtttaaggccatgggttcccttctgtcccagggtgtgtctagaaatatcatctgggaactggggcctggaagggaggcctcacaactctgactggtgccctagcctactgtggttgagctgatatccaaaatgcaagacaaagttcttttcactctttcctttcctctcctcatgtggatggaagaggtctcttttggagccatgagctatgcaccatgggggtagaggaggggtgatgccagcacccccttagctgccctggctggtatctcagtaggtcacatgccccaaaagtccattgactctgggcccagttcaggactaggactttcctaggagttgcagtcctagtgacctagaaaggcagtgacctgcctttcaagtttattctcagcctcagagcagtttagcctgcagtggtaaggcttgtgggatctcaagttctgactgctgggattggcgattcccctctggccagggctggtttaaatgctccttccgtgggcaggtgtcagctgaatttggtttgtttttactttctgctataacaagggcagcactgagttcatttcctcacaaatgctatgctctccctctccccagcacacggaattgttgctggaggatggggaaggggtggcgctggcaattaaagacagtttctcctgcctcttcagtgcttctttcagcaatgtggaattaaaaccagatactgtgagtggtcatctgatttttggtccttatgaaggtgctttttggtgtaggtagttgttaaattggggtcctttcaggggggatgattggtggagccttctattttgccatcctgctctgcctccccagacacgtcttcttaatatatgaactaactcaagaacaaaacttaaaatgttaaaaagatattatatcttttatcttttgggcctaaaaaggtttaacacattgtttttagtaggtattttaagtatatgtgccaagtctgtcccgcagactctggctgagtgatggatgacaaaagtactctgacacaggtattttgcctgacagcatggctagatggactgcaccccttagcactgccaatgaaagtgcagtgcaacccagagtgcagcccccataagcctgtgacacttgcatttatttagtacagatttaatgacaaaggattggagcaaacacaatttgtgggtaattaactttgccaaccccctgagtagagagcagtcctgtgcaggaatgatcaaaggttggtttctggagacataagtaaaccaacttatctagataagttcctttacattcccttgttatctaccctttgccttcaggttctggataacagaatttggctgccttcagccatttctccttcgaagcttttgcaaaacctcctggccttccaagaaggtttgagtctttccctataactttttcttacaacttttcccgccaccctgactgaactcctacatatatgttaattgaattttattcaatcaaatgtgtttttaatgctctacaaatgaatcaacatttaactgttgggataatttggaaggagggggagatgtaatgaattttatcatagctgacatttttacttaagaaattataaaatattttatattaaacaagtgagttaatatgaaatgcatagcttttgaagaagattaataaatagacacacatatgctaccactcaggttaaaaaatagaccattaccaatactttcaaatatttttatgtgctccacctaccacaaccttccttttccacacagagttagccacagttctaaatatttctttttactatctctgtgactttccttatgtttttactacctgcatatttatccttaagcaatctatggtttagttttatttattttacataccatactgtcatcgttatcttgtgactcactttttaaaaaattaacattatattttttagatttattcctgttcatggactggacatagttaactcattttcattgctgaatagtatttcagtctatgagtatctataactaacccattatcctataagtagactttggaatatatacggattttactgtttttttttttcttttataaaccatggtactataaatatatgcttataagagcacatgtgcaaggttttcttaataacaatgccaggggtcataggcatacacattttaaactttgctgtgtaacatcaaattgatttctagagtagtatgtagctgtctgctccacatcctcatcaacttttgccattgtcatatttatttttaaatttgttaccaatcccttggatataaaatactatttcactggaggtttaatttacatttccttgtctacaagggaggctaaggatcttttcctgtgttcattggccactattattttcccttggtaaaatatcttttttataaacaaagaatgaacacatttttttctattgtgctttttttttctgttgattagtagacattccttatataatttggcacctaatttttgtgagttttatgtgttgcaaatatcttcttgtatttggattattttcccattttattttataatagttttagaagttggcaatctgtcttttcctataatttatatgttttatgtcttaagaatccttttataacattatattgtgctataactttactggaaatattttaaagtttagtctcttacatttaaaccattagtccacatggaattgatttttttgtgtatgtgtgaaagaaggacctactttattccagtttcatttattgactaacttactctttcttcacagatctataattctgtctctctaataagtttccacatatttgcagggggatgttaagtcctgggctgtatattctgttccactggtttgtttgtctatctctgcaccatgaacaccctttcttaatgaatataaatgtatgctctgcacttatattaggtaaggtaaatacctttcatttttgtcatcttcagaattatcttgactcttaatgcaccattgctcttctattaagattttagaattggcttactaactttaaaaaaagatccctattggtatttattttggagtcgtatttaaagctcaattttgtatacaatgctattttaattaagatgattcttttaatctttcttctcaacataaaaggatcttggcacatgttcatttagatagttgttgtcctgacttaaatatgctatcgatgttcagtattttagttttctttttaggctcataaattgacaatattatgatttttttgcataaaggtagtttgtttagattcacccttatgattgccatttgtttggcttaccactacttcttacattttgaccttttattttgagattattatttttttctcccgaagtacgtattttggaagtatctttagtggagtccttgataataaaactcttatttttaattgaggttcccttacctgaaatatagtttagttagatatagaattttacattgaaatttattttatttttggcatcttaaagatattattctacttgctttttgtttacagtattgctggtaaataaagagttgtcagtgtaatagtcattttaggagataatctgctcttttccttcatttgggatttttttttttggtctttgattatctgctgtttctctactacgagactaggcatggatttctttttatttatcttccttgagagtcattgtttcctagattccaacctttattcaattactggaatttctcagctgtcgtttcttcgaatattttatttttttcattctttatattatgtgtgtacaaaactctggacataaaatagacattcatttataacataaatatttttgagtacctactatgtactgggtactttttgtctccagagatatattagtaaacaaaacagataaaaattcttattaccatgatacttacattaaaaggtgcagaatactagaagaaggtgataatagctgcagagtaagagagaccaaaagaccaaaatgctagcatgggggcagggattacttctatcttcctttttaaatttaaatatcaaaagttttttcagctatgctttaagtggcaggttttcttacctcatataagcttgattgcctcttcttaacttccattgtatgtagtgttatatacagaagtgaaagtatctttcccgatttggtcttacagaacagagtacagtgtccttaaatttctcttaagtagattctatatttctgttcgtgtaggctgtttgtatcagcttctttgtttataattatttaccaaattgaaaaggactttaatatttttcagctttaaaatagagatgccaaattacatgatctccaaggcctcttctcattttcaaaatactatcacaggctgagagaatcaaatccagcatttttgaggtcagaatatcatacaactgaaggtgggtgctatttacaaaaaataaaattaccagtaaaaaattagtcttgtaagaggcctgtgcaaatggaacaccccaaagattaaccttcaacagcttaatgaaaattctgccattgctacacatattaatatatatgttacatgtctctccatttttttatttgtaagtaaagatagattataatagtgaatagatttatagcatgcttcaaacagcctttggatattccatgtcccttattataacactagcaatgtgctagtgtcagtgtacaaatagccttttacttaatttgccagcttcatattttggatgtgttttggcttataattcctcttcctatgctcatttataattaaaacagatgttagttacaattgtttattaagtcacttattcatatttcctgttaccagaatctgacaaggacttttgagaggaaaagaacattttcaaataaaaaataccctaaaaacatttttctttttctttttttgggggggtgggggacaaagtttcactctcgttgcccaggctggagtgcaatggtgctacctctgcttactgcaacctgtgcctcatgggttcaggtgattctcttgcctcagcctcctgagtagctgggattacaggcatgtgccaccacacccagctgcttttgtatttttagtagagacggggtttctctatgttggtcaggctggtcttgaactcccaggctcaggtgatcctcccgccttggcctcccaaagtgctaggattacatgcatgagcctctgtccctggcccctaaaaacatttttaaagaaacaaaacaattagaaacataaccatgaaaatctagattcagaactctatcatatgtttgtgtgtgtgtgtgtgtgtgtgtgtatatatatatatacatatgtatttccttatacttgtttttagaaaaaaattcttttaacaacaaatttaatcacaaagaactataattagtactttccatgggtactactccccaggtaatagcagcatacaatttcagttctcccacagatgatgaggggcagaattcttctccctctactaggagactgcatgtgccacttactgtaatttcccatggcctttgcaggaaaattacatggggcaaagaaataaagatgagcacttttctttctctgagtattctcaggtgaatgacccccaagttaacaaacaggtgtggaataatcttttggtgaatttgatcctattctaatttgtgtcataaaactgaaacatgttagtattttactcttacatttggacttagtaactcacaagagactttttagtatattctacattagtatttctcaaaatataatcccatccttgattacaattaccactggtgttttttatgatatcagcccagacctgtggactcagaatcttgtagatcaatgagtagggaggagggatatgtatttttgtaagttccctgcgttacgaatattcaagtttgggaaccacagtttaatataatgatgcttaacacatggcatatgtgcttcaatttccttattgtgcatctgttgcagacattactaactgatcacaaaattctttcctacgaagctaatataaagccacacaagcctactcaacattgtgcctaaacagctgtttggcgtgcatgataaaagcctctcctggaactattctataacgacattgctattaggcaatattgtctttaagaacatagctaataatttagagataaacactgatgttctttaaattgcaaagagaggtcagaaaatttttgcacaaagtattggatataaggcctagagcagagtacaaagcaagtcagaaactatgaggtgttggctctggaaatcacattcatagtaacaaaaagcaatcaatgatagaagaaaacataaacagaagatatagtcattcaaaggaaacaattggatgaggccattaaatagttccttatgattccacttagtaagttctgaaggcttaaatatggatggcataaattctgttcataattttgacccacaatacgcagaaaaggattagtcttataaggggcctgtgcaaatgagaggcccaaaaattgcccttttcatatattatgttcaaggcattatcgttttagaaagttccctaacaaaggaagctaaagtaagagaagtgcttgaaatataagttattagctaattgataatattaattggaaaaattttcaatcttaggatttcagatactcatttttactattcatatttactttgttttattctattataatactatttattgaataccttagtaatatcacatttgtacattatctggacatcatgccctacttataaaattgaacttcttacaatataactctacttttatgtagtcaatttagaattatatcaggtgatttactgtcaaataattcttattaaatgccatttttccatttgtattcaatgcatttcataatttatgttaagggtgataatttctgaaacagcacatcaaaaatataaaaaatatacttattgcttttctgataacctcacagggctaagatctgtaaatccttactctatgtggtataaaaatggtaatttatgggtattctaaagcaaataaattcttctacaaaaaatggttttggtcattctttaaaaacatatttaccatgttaacaattaatacataatcataaaatctagttaatattttatgtactttaaaaatgtaatccttgtggaaatctgttttcccatttaaaaatcaccttattttctatataaaatattgataaaattaattgttttacaggaatatgttggcctgatagactaaggaaggggcttcagaaacattctttaagggagttgcttgtgacaaaacacaccattaactttatggccaaattaaaacaattttttaccatatcaattccaaatttactttttcttactggaatacttgaaacaagcactgaacatggaaacaggagataggagttccagtcttcgtttatgttaggttaattgttattataaagaaaaatcatggggaggagccaagatggctgaataggaacagctccggtctacagctcccagcgtgagcgacgcagaagatgggtgatttctgcatttccatctgaggtaccgggtgcatctcactagggagtgccagacagtgggcgcaggccagtgggtgcgcgcaccgtgcgcgagccgaagcagggcgaggcattgcctcacctgggaagcacaaggggtcagggagttccctttccgagtcaaagaaacgggtgacagacgcacctggaaaatcgggtcactcccacccgaatattgcacttttcagaccggcttaaaaagcagcgcaccacgagactatatcccacacctggctcggagggtcctacgcccacggaatctcgctgattgctagcacagcagtctgagatcaaactgcaaggccccaggagggctgggggaggggcgcccgccattgcccaggcttgcttaggtaaacaaagcagcctggaaactcgaactgggtggagcccaccacagctcaaggaggcctgcctgccactgtaggccccacctctgggggcagggcacagacaaacaaaaagacagcagtaacctctgcagacttaaatgcccctgtctgacagctttgaagagagcagtggttctcccagcacgcagctggagatctgagaatgggcagactgcctcctcaagtgggtccctgacccctgacccccgagaagtctaactgggaggcatcccccagcaggggcacactgccacctcacacagcagggtattccaacagacctgcagctgagggtcctgtctgttagaaggaaaactaacaaacagaaaggacatccacactgaaaacccatctgtacatcactatcatcaaagaccaaaagtagataaaaccacaaagatggggaaaaaacagaacagaaaaactggaaactctaaaacgcagagcatctctcctcctccaaaggaacacagttcctcaccagcaacagaacaaagctggatggagaatgactttgacgagctgagagaagaaggcttcagatgatcaaattactctgagctacgggaggacattcaaaccaaaggcaaagaagttaaaaactttgaaaaaaatttagaagaatgtataactagaataaccaatacagagaagtgcttaaaggagctgatggagctgaaaaccaaggctcgagaactatgtgaggaatgcagaagcctcaggagccgatgcgatcaactggaagaaagggtatcagtgatggaagatgaaatgaatgaaatgaagcgagaagggaagtttagagaaaaaagaataaaaagaaatgagcaaagcctccaagaaatatgggactatatgaaaagaccaaatctaggtctgattggtgtacctgaaagtgatgaggagaatggaaccaagttggaaaacactctgcaggatattatccaggagaacttccccaatctagcaaggcaggccaacgttcagattcaggaaatacagagaacgccacaaagatactcctcgagaagagcaactccaagacacataattgtcagattcaccaaagttgaaatgaaggaaaaaatgttaagggcagccagagagaaaggtcgggttaccctcaaagggaagcccatcagactaacagcggatctctcggcagaaaccctacaagccagaagagagtgggggctaatattcaacattcttaaagaaaagaattttcaacccagaatttcatatcaggccaaactgagcttcataagtgaaggagaaataaaatactttacagacaagcaaatgctgacagattttgtcaccaccaggcctgccctaaaagagctcctgaaggaagcgctaaacatggaaaggaacaaccagtaccagccactgcaaaatcatgccaaaatgtaaagaccatcgagactaggaagaaactgcatcaactaacgagcaaaatcaccagctaacatcatgatgacagaatcaaattcacacataacaatattaactttaaatgtaaatggactaaatgctccaattaaaagacacagactggcaaattggataaagagtcaagatccatcagtgtgctgtattcaggaaacccatctcacgtgcagagacacacataggctcaaaataaaaggatggaggaagatctaccaagccaatggaaaacaaaaaaggcaggggttgcaatcctagtctctgataaaacagactttaagccaacaaagatcaaaagagacaaagaaggtcattacataatggtaaagggatcaattcaacaagaagagctaactatcctaaatatatatgcacccaatacaggagcacccagattcataaagcaagtcctgagtgacctacaaagagacttagactcccacacattaataatgggagactttaacaccccactgtcaacattagacagatcaacgagacagaaagtcaacaaggatacccaggaattgaactcagctctgcaccaagcggacctaatagacatctacagaactcaccaccccaaatcaacagaatatacatttttttcagcaccacaccacacctattccaaaattgaccacatagttggaagtaaagctctcctcagcaaatgtaaaagaacagaaattataacaaactatctctcagaccacagtgcaatcaaactagaactcaggattaagaatcccactcaaaaccactcaactacatggaaactgaacaacctgctcctgaatgactactgggtacataacgaaatgaaggcagaaataaagatgttctttgaaaccaacgagaacaaagacacaacataccagaatctctgggatgcattcaaagcagtgtgtagagggaaatttatagcactaaatgcccacaagagaaagcaggaaagatccaaaattgacaccctaacatcacaattaaaagaactagaaaagcaagagcaaacacattcaaaagctagcagaaggcaagaaataacaaaaatcagagcagaactgaaggaaatagagacacaaaaaacccttcaaaagatcagtgaatccaggagctggttttttgaaaggatcaacaaaattgatagaccgctagcaagactaataaagaaaaaaagagagaagaaccaaatagacacaataaaaaatgataaaggggatatcaccaccgatcccacagaaatacaaactaccatcagagaatactacaaacacctctacgcaaataaactagaaaatctagaagaaatggataaattcctcgacacatacactctcccaagactaaaccaggaagaagttgaatctctgaatagaccaataacaggagctgaaattgtggcaataatcaatagtttaccaaccaaaaagagtcaaggaccagatggattcacagccgaattctaccagaggtacaaggaggaactggtaccattccttctgaaactattccaatcaatagaaaaagagggaatcctccctaactcattttatgaggccagcatcattctgataccaaagccgggcagagacacaaccaaaaaagagaattttagaccaatatcctcgatgaacatcgatgcaaaaatcctcaataaaatactggcaaaccgaatccagcagcacatcaaaaagcttatccaccatgatcaagtgggcttcatccctgggatgcaaggctggttcaatatacgcaaatcaataaatgtaatccagcatataaacagagccaaagacaaaaaccacatgattatcccaatagatgcaggaaaagcctttgacaaaattcaacaacccttcatgctaaaaactctcaataaattaggtattgatgggacgtatttcaaaataataagagctatctatgacaaacccacagccaatatcatactgaatgggcaaaaactggaagcattccctttgaaaactggcacaagacagggatgccctctctcaccactcctattcaacatagtgttggaagttctggccagggcaattagacaggagaaggaaataaacggtattcaattaggaacagaggaagtcaaattgtccctgtttggagacgacatgattgtatatctagaaaaccccatcgtctcagcccaaaatatccttaagctgataagcaacttcagcaaagtctcaggatacaaaatcaatgtacaaaaatcacaagcattcttatacaccaacaacagacaaacagagagccaaatcaagagtgaactcccattcacaattgcttcaaagagaataaaagacctaggaatccaacttacaagggatgtgaaggacctcttcaaggagaactacaaaccactgctcaaggaaataaaagaggatacaaacaaatggaagaacattccatgctcatgggtaggaagaatcaatatcgtgaaaatggccatactgcccaaggtaatttacagattcaatgccatccccatcaagctaccaatgcctttcttcacagaattggaaaaaactactttaaagttcatatggaaccaaaaaagagcccgcattgccaagtcaatcctaagccaaaagaacaaagctggaggaatcacactacctgacttcaaactatactacaaggctacagtaaccaaaacagcatggtactggtacctaaacagagatatagatcaatggaacagaacagagccctcagaaataacgccgcatacctacaactatctgatctttgacaaacctgagaaaaacaacaatggggaaaggattccctatttaataaatggtgctgggaaaactggctagccatatgtaggaagctgaaactggatcccttccttacaccttatacaaaaatcaattcaagatggattaaagacttaaacgttagacctaaaaccataaaaaccctagaagaaaacctaggcattaccattcaggacataggcatgggcaaggacttcatgtccaaaacaccaaaagcaacggcaacaaaagacaaaattgacaaatgggatctaattaaactaaagagcttctgcacagcaaaagaaactaccatcagagtgaacaggcaacctacaaaatgggagaaaatgttcgcaacctactcatctgacaaagggctaatatccagaatctacaatgaactcaaacaaatttacaagaaaaaaacaaacaaccccattaaaaagtgggcgaaggtcatcaacagagacttctcaaaagaagacatttatgcagccaaaaaacacatgaaaaaatgctcatcatcactggccatcagagaaatgcaaatcaaaaccactatgagataccatctcacaccagttagaatggcaatcattaaaaagtcaggaaacaacaggtgctggagaggatgtggagaaatagcaacacttttacactgttggtgggactgtaaactggttcaaccattgtggaagtcagtgtggcgattcctcagggatctagaactagaaataccatttgacccagccatcccattactgggtatatacccaaatgactataaatcatgctgctataaagacacatgcacacgtatttttattatggcattattcacaatagcaaagacttggaaccaacccaaatgtccaacaatgatagactggattaagaaaatgtggcacatatacaccatggaatactatgcagccataaaaaatgatgagttcatgtcctttgtagggacatggatgaaactggaaatcatcattctcagtaaactattgcaagaacaaaaaaccaaacaccgcatattctcactcataggtgggaattgaacaatgagatcacatggacacaggaaggggaatatgacactctggggactgtggtggggtggggggaggggggaaggatagcattgggagatatacctaatgctagatgacgagttagtgggtgcagcgcaccagcatggcacatgtatacatatgtaactaacctgcacaatgtgcacatgtaccctaaaacttaaagtataataaaaaaaagaaaaagaaaaaaaaataaagcccttcaagtgctacaaaaaaaaaaagaaagaaaaatcatgtgctcaactaaattggacatagttgttcatgtttgtattctatgaacatctagaaaacaagtacttaccatatgtagatatacacacacatatgtttttgggaagaaaaatcttgaaatggattggttaaaataaagacacagacttttaaagatcactgtaactcagatttgcagtatgaacatttaactatttcattgacaatgataaagatttttgccacccttctttttgtaaaccattgcatcaagaatcacaacagtgtttcatttaaaagcaacctaaggtaggaaagagcgctgagtgtgtctctagattctaattatgatttattacaagaaacattttaacaattcttatttaacaaattccagaatatctgactctccttaaactttaatataaaagtatcagttttttttgttttgggagtacttctttaaaatcaattatttactgtatatctttataattatagcaaatgtaattaggatataatactgtgttgggattattttgccaactttgttaaatgacttatttacagaaaatctgacatcttctttgcctctattttaagtttgacatcgagtggttagaattttgaggaagtttgatcaatgatgaaatgatagcttggtagggcatgctaacctaactgtttaaaaaatgtctcttcataatttataatgacaagcacttaggttttatttaactacactaatgtattctatttaagtatgtctaagtacttatagcttacctatatccatagtattaatacaggctcatgtctaagagtaatttgtaactctaaccttatataatgttttagtttcattatttctagtgattctgaattactgctgtattttctcatgcacatgataattagatgagcttctatcaaagcatgttcttgtttaattattactactgctttattaaggaatattattgtttttcccaccttcatttcatatcttcatagtccatggttatatattttttattccaataactgacagaatatgtaataatttaagttttattcagccagattatagagatgaagaaaaggatttgcaaattagtttgattttatctttgttcaatctcctatctactgtttgtattatatatttctttttgttgaatacagttaagtttatctttaatcaggactgacaatctttttcagtccaaacctcttgaatagctaggagtaaagacttgacaaacttcaactaagtaatattatggtaagagtcccttaactgtcacaccttaccttagtggaaatgagttaactaacttaacaccaaagaacagttgtagaagaataagcaatgtaggagagaatactgcttgcagtattggatttaagggaatttccaagatctctattattcactggcacatggcgaggaaatctgtttaaatcagttgtttccagttggttcttcagagtagatggtgtttatcattatcaaggctctgatatatcgaatattaatgacagataaaaaagagaatctcaatcattgagtatgtctgcaaaaagagctagctccaatttaaaagggtattaattttcatagagaggtaatattttttctgtggtattccccatgcttaatgtactttctaaacttggatgtacttggatagaaatctgttgttttaaattgaatattcctctgttcacccttatatttcattgaaaacaatattcagtgatatcatcagtaaaacaataggtatgaaataggtggcttctttgtttaataaatatgatttttaggaatctgacaaagaactaatgagttgttttactataaaagttatgttgatatgcataaaaatagaaaaaaattccagatttttagagaagaaaaaatatcttaaagatagtttaggaaaatgtaaatgaatataatctaaaatatttgtgtatttgtcattttaaaaatataaataattgaggtaacttcaggataaaaatgtcactatgatgtgtcattatatatttttcttctgaatcacatgatttatatagaagtttatctgcagaatatgagattcatcttgtgttatctgaatgactttttatctgtacaccccaaagactatttcatgatatcttattttgttaaataattgctagttttccaaaagtatataagtttcaaaagtgaatttaaaatttcaagaagactcatagcctgcaagtctgattttatattttcattctttgttgcttattaaaactacagttgcattaatgactgttgaggactttgagaagagttagtctcccaattgttgaaaggctagtggtctgctcttcttttttcccttaactgttcaattctcagatattgaccagtggaataaggtaattgaacaactaggaacaccatgtccagaattcatgaagaaattgcaacccacagtaagaaactatgtggagaatcggcccaagtatgcgggactcaccttccccaaactcttcccagattccctcttcccagcggactccgagcacaataaactcaaaggtatgcccttcaggaatgacttgaggacaactatgagggtgacgggccaaacaagcacacagtatagagacctctatctctttctctttgttcccttttatttttagttgacacatgataatcgtacatttttgtgggatatagggtggtatttttgaaacatgtatagaggtataatggtcaaatcagagcaattagcataacccatcacctaaaacattgatcaattctttaattggcacagcctcaagttaaagaaatatttcttcaaagatcgttcctacaaaggggagtagccacggattttagaattgtctggatattcagggccgggggcggtggctcaagtctgtaacctcagcactttggaaggcggaggcgggaggatcaagaggtcaggaaatcgagacagaccatcctggccaacatggtgaaactgcgtctctcctaaaaatataaaaaaattagctgggcatggtggcacacacctctagtcccagctactcaggaggctgaggcaggagagtcgcttgaacctaggaggaagaggttgcagtgagccgagatcgggcaactgcattccagcctagagatagagtgagcaagactccgtctcaaaaaatagatatatattatacttcataatgtaattccaattttcttgagtttactttttaaatcaatttgaatctctgcaattatgtttgtaaatgataaactagtttgcatatttgattattgaatttaatttttaatataaaattggcaaattataaataatcttaatatacaaataaccaaagagaagaatgtattctactgtgtttggaaaagagcataacacatttgctttcaaatgaaagaatgaaagataaagcattgaaacattttcccatattgtttcctaaaaatagtattgtttcttagcaagatgattttgtattggtgtagttcatgaccctattcatgaagaatccattgtaaccccagccctttctttttttttttttttttttttttgagacagagtctcgctctgtcgcccgggataccgatctaggctcactgcaagctccgtctcccaggttcactccattctcctgcctcaacctcccgagtagctgggactacaggcgcccgccaccacgcccagctaatttttgtatttttagtagagatggggtttcaccgtggtagccaggatcgtctcgacctcctgacttcgtggtctgcctgcctcggccttccaaagtgctgggattgcaggtgtcagccacgaccacgcccggctaaccccagccctttctaagagcagaaaaatggatagatttgatgagagaatcttatgagaatggtacatgaatttggatgtaaaatcagttacaaattaaagaggtctttaaagcaatgaataaataaacacagccctgttaggctattaggaggccattggcaatgagaaaaattaaatattgaattaatgtataagtatttctgtatttttgttattcctgtgcggtacagagttttaatttgaaagtaatgataatcagtttctaggattgagtttcccagaaaaatgattaatagaaataaaaaattctcaagtttaactagtgatttttcatatttgttcagaaaattaaaagatatatttattgatgtaattaccaagaaaatacttacaggtaaaaaattaattgctacattttaactatagtatggttaatattacgtgaaaaatacatgaacggcactagaaaaaatatgccaataatcacagtcattgcctctagctagtggggttagatattatttcctgatttttgtattttatataattttcaaatttgtagaattagccaagttgttttaatctgaaaaattgattaaataaaaattgatatgtatccagagtcatctatgttgattttttgaaaaatccatttaaattttgttatctttaatttgatgttttaccatatagttagaataaactgaatattttcacggttcaactttcagatcagttgagtaacaatattgatttgagatattcatttctgttaaaactttatgtaaaagactaggggagggatagctttaggagaaatacctaatgtagatgacaggttggtgggtgcagcaaaccactatggcatgtgtatacctatgtaacaaacctgcatgttgtgcacatgtatcccagaacttaaagtataataatttaaaaaatttacatatttttagaggttaaaattaatgtgtcttttaacaatcttactaaataaatagctatcaccatataattttataactgttactgcccacaaccataaaattaattatgataacctttacataatatagagtttctcattagtgtctggtgtagcattagactggcttcagtctttaactactggatttcatcaagtcatgattccattgattaaaaatacctgatgattacagaatgttaaaataaaattcagtagttgaatgatattatttctatcacttcaattctttgattgtttttatgtatataagaaatttgtggctgggagcagtggctcactcctttaatcccagcattttgggaggctgaggtgggaggatctttgagcccagagttcgagaccagcttgggcaatgtagggagatcttatctttacaaaaaaaaagaaagaaagaaaaaatagccaggcatggtggtgcatgcctgtagttccagttactcgggaagctgggatgggaggatcctttgagcgcaggagttccaggctgcagtgagctgtgatcattccactacactccagcctggcaacagagggataccctgtctcaaaaataaataaataaataaataaacaaaaacaaaaagaaaagaaaaatttgtatgatacaaactcttaagtcaatttatatactaaaattctgataattccgttgtataaataagaatatagagacacacgtgttgattaacttcaaacagccgtccacacatttgttgaacatcatgcatttgcactctgtgctctttattctgtttatcctatattcatgcaggttaccaaagaagatgactttgcttacataaactctccaggttgatacattttactaagaagtttgcgtgaataattatatacccaaagtgttacaacccttggagagcctcagaatgaagccttaggcttagagacacaaagaaacaggtgtaaaatgcattttcttttccatcacatcaagggatttacctgatgtttggaaggaagatactattccatactttgttttcttaaatttcctctctgacaaatttccttactgaaatcaaaatcttactaattgtttttctcatttattgtttcagccagccaagccagggacttgttgtcaaagatgctagtgattgacccagcaaaaagaatatcagtggacgacgccttacagcatccctacatcaacgtctggtatgacccagccgaagtggaggcggtaagaaataggctgcctttactttgcttccacaaacaaatcatagctcatagcaaaaactgaataggactagaagcctaaagaatgcacaatggatttttataaaatttctaagtccaaagcctattatctgcccctctaaaagctattttcttcaacatatgttttaaatacatttttttcaggacttactagaagagggtatgatttagtcctacaaaccttagatgtccatgatacactaccatttgtttctgttaaattgccaatacttgtgtttcttcttgtgtgtttgactgccagtctcttctaatgcaaacttagtggtaggaaacaacagaggacaagttgcttagcttgtattttttttttgaaaagatacctgccactagtaaaatgtgatacttaagaatatttcaattagaaagcttttataagatgattaaaacgattggtggctttgtgaaaccttgcatgaactagatgaactagaagtgggtatttcagtaagtacattacttcaggttgatcagtatgatgtatctccatgtctgatacccagacatggagaatcttctcagaagcataactctttctattttaaaaatatttttcaaccatttactatcttctgttcaacctctttctttcatctttacctctctcctttcctctgtatggatccagggctgagcagggcaaggggggcttgctgttgcccatgtgtgttctataggcctcctgatgagaatttcctttctgcactgcctttaaatgtttctatcaggaatgttaccttctcccttaaacatgagaagcttctcaaattcttagagtacctgtgctaaagcatctcatatttttttacataataccttccaatccatttgtttggatttgttcttaatctttcatttgaaatactgtttgtttccccaaagtattcttaaagatattttcactttctttcagttttctttcctctgcttcaccatgtgtttttccatgtcagaggtgctagattcaaacacataattctcatttcttcattcttcactagagaagatacgaaagaaagtgagaactaggtagaattgaactttacagacacaatattaaacaggtccttttcataatgtaacccaatctttaagcatttaaaaacttcagagaaaacacttaagtgattaatgaatctcccaagtgtgaagactgcactacattttgtttaagatctgctctcttagttttacaatgatgttgagatttcatgttgcctcaagttaatttttagtcattttatttgattcttaccaaataatatccctacaattaaatatttctgagtttaattataatgttctaaaaattaatatatattcttacaaccaaaatatagaacctcttccagtctcccacacttgggaaatacttgcacagatgttcttgggatggaatgaagtagtgaagtaagtgagagaaagtatgatgtatatgtttacaaaaattaagtataaaaattttatctctgatgaaattcaagaaaatattttaggttatgttgataaacattttatataaatatgtattatctgaaattgtttctcctcatttattttgaggcatattaacttatgcctcactatgtggcatatttattttttcttatatctaacttaatatgtataatctgtttttaatgcattgtggcctagagtttaattagagtcataaagtctgcatttgtaattcacttttaattatgttgcctataaaagagatagttgcttggaatctataacatcttactgaatagtatcaatgagtttttaaatttattttaactttttatgaaaaacttctttgtagaatgaaaagataaaatttaggatactaaaatagctggagcctttttcttaaccactttgatattggtcatgctggggcacggatagtaacaaggcaggatgtatgaattttaggggaaggatctgatagagcctgcagttccagaaaaagaagacagttaatgcacagaacaagcaagtacttgacatctagactcagatcattgattatacaagggtaaacatgtcttacatctagacatgttgtagtgaagagatgggaatcatgatcccagggcaagaacaatttattactctatgaagtgcattacagtggtcacaactaagaagagaaagatcctgaaggtgctagaatcagtagtcagctatgctttctgcaatatccttagaattcatgtctctgttattgcatatgaacatgtgtttaacataagataacctttctctatggacacatggcaaagctataatatagtgatatatcttctgccggggctgacaagactgttttgcaaaatatacccccgtatgtctttataatccaaataaatggaagtatcaaataattgggatttttattctgatcaaagagctttcaagtaactcacatgctgttagggagggaaggaaattcaaagatgagagagaagaaaaataagtttcattggatggaaataatggcaagtggataggggataaagaacaaactatgataaggtgatatttagaggaaaagtcaaaagagtatagatatgctatgtgtgctaagctattagttatactacgagctatcttatcatgtttcccaaactaccaaagtacaaaaatcaagagagaagagcatatgaatgaatgttgtcataattctgagagggaaaattagtcatgtacacatgagttagaaaattttaaaaattggatgccaagctcaagagtaatccatctgtgtagtaatagtacataaatattttgaaataactgctcaaattattagcaacttcttattcaaataatgtttagagtaacaaagtgtgatttcaaagtagaacacacaaatcgtgtataatgtcaatgctttttcatgaaacaaatagaagatgctctaactctggttcagtattcatcaagagggcaaatatattacacacaaatgtaattggttgacttatttgcatcttcataggtatgaaagatgagttaggtttaaatttctgctcttcccattactaatttgctttgatcaagttgcttaacctttctgcaactcagttttctaaactaagaaagttctcctttcttatcatatgtacagcatagcattctgagattttgaaaagttaaagtgcttagcaaatgcttgggagtcagtaagaatcatgtaaattattcttacccttataatacttataattactattactattatgacttttacatgcatagctttactatcttttgatatttgaaaaagatatatgcgtctggtgaaaaagactagctggccaggaaattgcagaaatattccacaacatttcttttttgaacaatgatgacaatgatctatttcccacatgattttaggtccatttttttcattttcttttgtttaatgtatacctacctcttctttgccaggtagaagaaaatctagtgtcattagtttaaaccaaaataaagacacattatagattccacaaatcttgattatcagtaggagatttttgggattttggggggaactcagtttaatatcttccttgtgccctgttggaagaaaatacaatgttcatgaagctttgttgccttatctcttaccacattactgagtttaggcaccctgctaggatccagtggtggctttaccactgagagtggagctacagataagccttaaggagcatctgggtgaactccaagctaaggaagagttgattaactatttctcagggcacagaagaagaggaacataagctgtaactattttttttaaatagctttatttctgccagaaatttcagagcacttcaagaaagctcctgagtgcaacggccttacaaaaggctccattttgtagttcttgttccttgcaagggcatagggagagggagcaggagagggagatgtgagttcagccaaaaccaagtacatcaaaactcaaataaatcatcatgaagaagcctagtacaaacatatggagtcagagaacacttcatgattcctcaattcttgactaaaaggaaggagctagacctgagattagaaccatcccctaagatgggacaggcgttgaggccaagcttcatggccagtggtgatcaaccagatagaccattgtgttgaaggctgtgtttcagagatgcccagagacagttcttaatggctgaaaccttactctgggaatcagggcagagaggcaggtagagctgcttgggcagctggcattttggaattcttttctctagtaggtgaacctggggtacttgagaacccagaggacagctggcaggaaacatagggccttctgtgtggcagccaaatgaaagttccagaagagaatgctggaaatgaggcctggaaattgtactccagctataatgtagaccacagagagagagcgggcatgttttgtttgggaatctaaggacacacgacatcctccactagactaagagaaaaggtgtaactaattcaaccaatttggctggaaggtgatttggtaaacagggccagtgctgagcttgcttgttattttttcacctaactcaagattaatttgggaattgggacagggttgggtgggaatttaatctaccgatacagatcctgaattaaacaacatgatcttcagattcccagggagagtataacctgggaaacagagtaacagttacatgtattagtgctgaagttcaattaaaataaacacttaagaaacatgagcccagaatagtcaacactattacacatttactgtttgtttataatgtaaagtgattaagagggtcttaaatgcttaattattattatttactagttcactactttagggattatgttatttttgcctacggtgaaagaatttatagaaacaagttaacctggctatattaagctattttattacaaggccatcatagattccatgccctgtgagcagagttactatctgacattattttatccatcttcttgtctgccattatatcttactggatattaccaaagaggatgcatggaagggatgaccaatcatgtgggaaatatactttatttttaatcttcttgtgacacaaatatgtaaactttgatattgtgtatgcctattatgcctaaaatctattcaaggtaaatctgaagtgggaacttagagataattatagagtggttttgtcctgcagttcagcaaacatcagcattcagagtagcaacttttcaactttgagcagctataggaccagcaaccatgatgaagtgaatggaatagagctagatgggatcagaagaaagagagaagggaatcagaagcctgtggtcaaagtagaacaggttccagagcttgatctgggcattccagagagacagctgatgcagatatgtaggccaagcagtcaagaccagctgggtagtcaggagagacatgtggtctaagatcagagatctaagtagatgagaccctaaggggtatttaaaggtgtcagagataaggatgttctcatattgcaatgcagaagtcaaaagcagacactcttggaccaacacagagataagcaaaaatgggaagccactaccaacctgagagctagggggcgatttactggagcccaggtagtaatggcctgtccaatgggagctagagtcactaacacaggtaagatacagctgcttctagagaaaagggtggggagaaatggcctagattctcccctctgtctcctggtgatatctccctcctattggctgagaccaaccctaaggcaactgacagacaaatctgggaaatatggcctaatagagtccagccccctgagaaaaagagcaactaaagaaagggggaggacagcatctgtgggcaaatgtgtccagggctggcacttaccaggtcattctttccttattcacaattctgaaatccctaagtaaaggagaagtaaccagggaacggagcacaattcctctggagaggagaagactttagatgttagaagaggtactcaaggacctcccctagtaaagtgaagtaagcatccccctaataattatttaatttcttcaagtatttcatgatttcttgccaagacatcgcaagtactataccaacctgatagtcttggcagaagcgtatttctcattggggtttccactgaatgtgcacttccttccttttatgtgttgatgtcactctttcgattgttggttgtagggctacagtcttgttgagacaatgttggaccacatgtacgtaaggggagtgaaaggattcagccatctgttttcttttaggttgctgtaaatctactcttctgctgccataggaaagacctctttcactaggaaagaacttttcactttcctctcactcacctcttttttatttcttccttttttatctcttcttcacttcttacccttttctcttttttatccaacagagttattcacataagctttgactatttgttaacagtttagtatttattcacttattctataaatattgactgaacccacactttgtgttccacactgacctagatgatagtgattcagcattgaatttttaaacaaaaaatgaaaaaaaaacaggtccctgcttttattgttcttggtaggtttctaatagttaatagcaatttctattgaatgagaatctttgataacttatcatctcctgaagaaacaaaataaactcctccaaatatgaattatctaccttacttgattatttaacttgtttggtgtatggtttcctgactgtagaatctgaaatcctatgtcccttgaaatgttaatcagttataactaaactgcagtgagaatctgctaatcttcaaccagatgtgcatcaactgctttgaatcataattaacaagttatgcttatccacttttagctatgatttttaaactattatttgactgaatataaaataatgtcctgctgggcacagtggctcacacctgtaatcccagcactttgggatgccaaggcgggtggatcacttgatatcaggagtttgggcctggccaacacggcaaaaccccatctctactaaaaatacaaaaattagccacctgtagtgccaggtactgggaaggctgaggcaggagaatcgcttgaacccgggagacagaagttgcagtgagccgagatcgcaccactgcactccagcctgggagacagagtgagaccgtcttaaaaaaaataaataaaataaaataaaataaaataaaataaataaacaaaaaagtcctgaccaagctgactaagtttggttacccaaatgcatagattattactgaaaaccaaagaatcctaaagttgctatactaaacataaaagtatacaatctttaaactataaattaaatctttctatttactatagcaactaaataaaaatatttaatttatattttaaagattcatgtattaatttattgaccatctgaagcctttgagcatagttcacatgactgaggatgatgggaaggagttattctcattccttattatcactgacttttaattctctcaaatacatttttactgtaaaagctaatatcatttgattatgaatatcctgtgttacttgctctattaaatctactccatgaatgagttcttgtttgcattgtttctacctttattaactgtggcttaaccagttgtcttttactgaattctcttgaatccataataaattcctgaaacaacatggtgaagaatagacttataaatatatttgattataactagaagcaatgtactttgttagactcagtatatatgaatttaggaatgataaggaaaaatatgagctacaatgaatatgaatttgatgcatctaatgttcaaatagttcatcagtagatatctactgtttggagataaaccattgaataaaatatgcataagtttgcttcaaatattttataatccttttattaaattggttagtttgagtgtagcactgtgagttaaacctgaagtatctggaagacatgatttaagtgagttataaatgcaaacagctctctatacagactgtatctcccgttgggaggaaaggggattaaagtctttgtgagtcacattttcctttgatgagtgatatcaaaaggttagggcatgtcctcaagacaatttctgaataactaatccatctgaaattctgaaactacagtttttgtttcctgattttccccacagggtacagtaatgtacttaaaatagttaataggcattatttttgtttgctgtcatttgatttgtctgagaaggaagtcagtttgcaagtgaagtttattatataaaatttaatagcaactctcaagtggcagaaaatacctatcaaatatttaaataagcataaactgcaaaacttgagttacttaaggattttttttggtagaaatttgaaaatttttattaagaaggaaaaacttcatttcactaaaataataagaaagctcttttaaaaaaacatttcatgggtagaaaaagcctctgttgctttttattaatagaaaagatctgcagtgcctatcacactgaatatgaccttggattttactgctagtttatttcttgatgctatatatgtgtgcacagttttagtaagtttccccatttttacttgtttagattttttttgaaacatgcttattactttggatttcaacttggaaagcttataaatgaaacatactattatacttgataaagcacatcaattgagttttctcaggaaagacctatttggaggtttttataaagggcttattctcaaaaagatttctgaggtcatttctagcattttaggaatatcaaacaaaaattttatctaagttcccctaaatattttcacaagtaagacaaactactgtatcctagaatgaggaaaagaataattaacaatgtgaataatttcaagtatctgtaatgtttagcatgttagtgattttatttccataatatgttttagtatttcttgtatattttaaacttgacaattagtccaagtatttcccaagtgcccatcaccagtttggtctataatctgtgtgcaggtcactggtgaccttttgtttcctggaagtagaaaaacaaagaggtaactcagtgatattgtactgtgagacatcatgattctcttttctccattctaaaactgccatcatttaaattctgtttttcgaccagatgtccttatgaattcttttaaatatgatttgttctactcacatggagttaataaactggctgaattcctccctcagctgttctctccatctgtcctgccacaaggactacctctttgagtctttggatttcttattattgccgcatgtgtcatgctgtgaaaaagctagtgtgacccatggcaggcttaatttgagaaatagtttagtaccatctatctgtcatagaagactctttcagtgtggagttgaactctaagtaggtttgttagactcagaatatatataaatttagaaatgaggaggaagaaatatgagctacaatggatatgaatctgatgcactctaattatgtgcttaattatagaaagagcaattcgtattttgtggttttcatttgcttggggaaagttaaatcaatgtctgtaattccatttgtggagttctaaatttccatctgttcatgctgatgtattctttcagcagcaaaatatgagcagtttactaattgccttccagagaaaatatagcttcattagattttgcttgcccagtgcctcagctgcttaacgtgaagctatcgtttgaattgccttcggattgttttgatgccatgtattatgttggtgggagcttgtcaaaatgtttgttgtagatagagttagccacctgcttttaggagcctcactccctatatgacttataataggaatatgtatttcactgaaaatatgtaactcatttatctctaattttagcaagttctattcctgaagagaaaggttcatcttaattttaattcattgggatattcagaatccactgaatccaagattctcaggtgtgaaaagctggaatggttgaattgttcattcttaggagagacatgttttgttgtctagtagaatccatgctttggtttttgttttcatgttttatcttgaacactttagaccatgagtgctattaatcttttgaatggatcactgagagagaatactttatgaaaagggggaagggaacagaaattatttttctaaaacatttcatgcctgttgctctctgaaaggctgaggtatggctaaggtattctgtcaggttcttccaaatacttgattttatttcttctctcctaggtgatatctgagatattgtgagatctacctatttatcttgaggtagtgggcatttgtgagagtgtattttattttcttaatatgtttcatcctggaaaaaaagagattatccaacgtgtcatctgcataggatgtaatccataaactgtgggagaaaaaaatatatatttttcttttttaggattccttctatgaaataagcaaagaagtcagggtgggaacttgtgagatgttctgttaactaaaatttaccaaattttatactaagaggaagaataaaaaagagaaaagaataggagtatgtcagaagacagaatctctgtcagacagctttgcctcgagataagtagaggctacaaaattggggaatctctaggaagcataactcttttggtaatttgcattcctgccttgtttgcttacctgtaatgttgctaaaacaatcaaactagacttgaatttttgtccatcatcaaagaatctcctcttaaccactgtgtatacatgttcaaggagagctctaaggcactcctacccatcctcatatcattgtgttttcagtaaagagcatttatcaataaagaaaatgatatgctctgcagaggtaatattgttttctgcaaggcctggatgttaattattatacataaactctgtaatttaaaggccacatcagttctgtacccagcagaattatttggtgagcagccctgcttaagttcctaaaggtttactttaagtagtaggtttgctatttgccagatttttctttgctcctttgctctcaaaatcaatgaggtttaattgcatgatgaacttttaaatactacattcttctttttaaaaaaaaaataccctccaggcacagtggctcaggcctgtaatcctagcactttgggaggccaaggcgggtggatcacttgaactcaggagtttgagaccagcctgggcagcatagcgaaatcccgtctctactaaagatacaaaaattagccaggcatggtggcttacactagctacttgggaggctgtggtgggagaatggcttaaacctgggaggcggagtttgcagtgaaccaagattgcaccacagcactccagcctaggtgacagaggaagactctatctcaaacaacagcaacaacaacacccgagtatatacatacttatcctccatgattcaacgtaacaaatgtttatagcacccctatgaatgctgaaactgtaccagatctagagatgcacacaggagggcatttctctgctcttaggagctcactacccagcactgagctttcctatgacccctaagggttccttagaggaacttctgggggcttttgaaaaacatcccaaaattttctatcaataattatgtatttacatctttctggacatccagttcacaggctttttcagatcttcggagttcctttactccaaatttaattcttaaaattttgaaaatcatgagtctagtaaagaaagttttcagtggatggggggaggggactgcaaaaatgctgataagttactcttagactagattatcatttatagacataacaaaaagatttaatacacgttttaggaaataatttattgtcttcgggtaattttaaaatttgtattaaaatgctctttcatctgtaaaagtcctactttttttaaggaaagtggtggaggcagaagtaactgataaatgtaaaatattatgctttcaatttttattattgtgatttaaaaaaactattaacattataaaaacagtttcttgtggtccctgacaattttaaaatggtatttttttttcaagaaatagaaattaatagccactgtctactcttcaagtagctagttcttttcttatgctgtgaggctttcaggggttcctcatactttgtttccactttgtttttcggaagcactcacttcctttgcgatatttattttcctctgccatgtttgtctccaaagatttttgtttgtttctttgtccatgatctaagaaggtggttatgttgtgcattgcaacaaaaagttgagacgatcaaatgaacaacaacaaaaacacacagaaaattaaccaaacatcttgtttgagaagtcatgcttagagctggtgatgctatcaatattaggaagtaaactaagaagtttgacagtctagcagagaaaggaaaataatcagaaagtgtaatcattaatgatgctgaaaatgaatatgtgtggtgatgtgaagacaactttaaacgctgtaggatgtttatgctgacatttaaaaatccctaaatgaaagctatagacatgaagtcggaatgtcatcacaactctacatagaccacaagtctggaagttgcagagctgcaaaagaaccagaaaaaggataggcagaaactattcctgggtgctaaatcatggtaaccttcagattcagggaaaaggctgaatctcaacattttcttcccaagtgtagatccatgacttaggccctagggcattcgttatatgtgaggagaaggtagaatagatgagacagaatattgaaaaggttacactccctttttacaagtctattaaaagtttatggtctttccaggagtatgtgctataataaaattattatgtccctttctaatggtagggcaattgtaagaatgataaaagccacttccataacttgctgcaggtttcatatgagactcagagggttgtttgtagaataatgacccacaatatattgtgaaagagaatataatgtatgtaaaacaacatgagttcaatcaacaatcaaaagatgctccccacagtttctaattccaagaagaatctgatttctatctttaggtgcattttgaaagctgaattccttcgatgttcctctgtaaaaagtgagagataaattagctaaccctcaagcactttttctgaaaatttcttacctaaggtatgtgttgtttttgactaagttagcgtaaagaacttttggtgactttctttcaggacatatatgccagaatgctgttttcatagtacagcaatctgttaccacttctttttctgaggtaggcctgctcatgcctcttgcaccattcctgtttaatcatgaacaatagtttattcctagccagaattcttacatgcatagtcacaggtaggttttcttaagtaatgaatagctcccccaagaatggaaggctaagctcaaatccaggcaaaaaacttggcttgcaattagttaatttaaaatattgccttacttagtctagctttcccaaagcaaaggactgtagacagacaatgggaggaggaccaagagttacagagtgtggagaccaaggtcatggcactgggagacagtagagcacagtggaaaccactgtgggtcaacaattagaggacatggactcaaagtctcatcataccttggacaggtccaccacattcattcacttaaacttttgttaagcttcaagtgtacgctgccattgaagattgactaattctaatgataaaaagacatagtttctgttatttagtagtttgtagtagagttaatatgtaagtaagtaagatactataaccatagtactagtgccatagaaacacaaaggaataaggcataactcatcctatagcagacataggaggtttttaggaggaagaaaagcctcaaatgggaccaaaaggatgggcaagagttaccaagtgaaatggaggtggaagagtagaatctggtaggcaaaggaagcagcctgctcaatggccaggagagaagatgaaccaggacacacctggggaactatgagttaattcactgtgagcagggaagggaatggtgagaaatgcagctggaaatgtaagcagggtcctggtcaggaaacaccttttaagtcattcccagagggtacccaagctgcaggcttgggggaacagattttaatcagggagtaacacaatgggattcgtgttttaggtagatcattctttctgactgatgaagtgataaaatagtagaaagatgatttaggaagctagtgaagtagttgaaataaaagatgacaaaatggacttcaatggcaatggagatgaagaaagaatgacattcagagatggtggtataattgcatcactaatctttacccatgaaatgtcctgtctaataatgttttaaaggaaaaaaatgtgaaagtacccaattaactttgaaaacataggatgttattaaagaaggttttcttaaagcttatggaggtaattgaactattttaaactgaacagttttagtctatgtgacataagaaaaatggaaatgttatcagttcctatcatgttaacacaaaagctcagttagacttattttcttttaaaattactccttggagtaattacttaatgaaaaggcaagctctgttttaagaaaatccactatgagatatatttattaaatacattaaaaagtattatataataatgtatataatacattaaaaagtaggagcaatggtaacgccttattattagaatatagttctttatgactgtatttgtttctcaaacttttttgttccccaacatacctgagagacagtcatcaactcattaacgttatcaactcatcaatctatattaaagcaatgattcttcatgtggggtatggcagattcttgtgggcatgttaattaattggaaataaatcctcactctcaagtgattctgttccccatctccctctcctcagagcaccactttctttctgataaacatctcatatgtaaatgtggtacacaaatgctttcttatataatgcaacaaatatattgaatccatgtaggtagaaggggcggtttttactagattagcagaagtctttatgcttgattgaaagacttcattaacctagaacctttatgtcacattctaaactttttcacagagattagtggtatgaaggggaaaaataaatatttgtaacaaaaagtatgtatattttaaaattaatagacactttggaattaaaaaaattattacatttcaacctaaaatataatattatccctctaacattagtgaagtatactcaaatcaattttccttaataatgtttctaattctgtagctatgtttcttcattcactgtggatttgtatcctggggctattcattgatgctaactggaagagtgtggttttctgtggtctccaggatgactccttattgattcatgttacttatgtaggagggctgaagatcctctttcccttgttcatttgcttttgttttgtgactgtagggcaaaagtgcaaatgacatgtggctttaatagactaactcagcaatatctgtgttcgatgtgtttttcacctagagctattttctagttcatttttagctcatatttgtcctacagaatatccttggggctaatgtgatcttttacctatgaaaagaaaggcttgcaacaaaagctactgcttctcagaattttaagttaactcattttctttagaaccttccatatgccattatcatattgtgcattatgctgcagtgattcatttttatgtctatcttccacaactctactgctgtaaagttccttgggagcagaaattcagttttatctaccgagtgcagagaaaacagtgagagtaatggcaggtgcatagtgtatggtcagtaaatgccctttgaattgaactcagctgtactctgctgagcacttctctagtgtttataaaaccctttctgatatccaatcttatttaagcctcataaaaactctagaaaatgatgactatcctcaacaactcttaactgaacttactttctaaatataccttgactcagatcacttctcatcctttcatctatgcaaacatcatttctaccctggaccatgtaatattctgggacttatctctcagcaccactcttgtcccttgtggtccattctgcagaatgcctagaattttccttttaaaatgtaaaacacgttacattcacataattcctcagctaacaccttcccatcttccaatggcttcttatcatatttataacaaaactcaaagtacttatcatggcttgcaaggccctaccacagtgttgtttcaaattttatcataacccatagtaagaagggtgttttacattgcaacccagcatgcgtgtacaagtgcacgtgcgtgcacacacacacgtacacacacacaaaagaaaaaccatacactgatattttctatctcattttactcttcttagttacactaaaaggtgctagtgatgacaccaatttgttttcatgactgcagtttggaaaacatggctctacttagtctggctcctgcctacttttctgatatcacctttaggcttcccttttccactctgcaccagtatatggcatccttgcggtttccttaccacaccaagcaagctccccctttagggtctttgcattgtatttccttctgcctgggacattcttcctccagatattcacattgctccctcctttacttcattcaaatctctgctcaaatgttaccttctcaaagaagccttttatgaccatcctttctaaaatagtactcttcggccgcccccttgcccgtcatgtaacacacattcgtgtgtaacctggcactaaaacataagtagatgacctgcttctgggtcagggtttcatatgtagcagaggggatccttgctgtgatctattgaaagtcagcccttggtacaagtgtttgtaaaaataatactaataatagtttaaaaagtaaaacaaaaacaaaaagaaaaaaactaaaaagaaaaaatagaatagtactctgttacactctagcctcttaatcttttttctctatgtgtcactgtttgacattatatatctctttttattatctgtctcatcaactagaatttaagatgcgtaaaaagagagacagtgactctttggggcactgctgtatcccaactacctagaacactgtctggcccttagtagtcatataatcaatatttgctgaatgaatgtatctgtgtttagaattgaagacactaaagctcaggatgttaatggatgttaagcacattgcccatgattgtgtggctaatatgtgtatatcaaaagctggaatctactttttaaaaattatttgagtaatgtcagacatgtcataatttatttcatctctttacctgaccaatttttccgagttaatatatcgtagatttttgaatgcaaataattgttcttcatcaatggttcatacttgttggatatctactatgtactatatactgtgcttccatttcttctagattttcaattgtatatctagaaaaccccattgtctcagcccaaaatctcaaaataataacagctatttatgacaaacccatagcaaatatcatactgaatgggcagaagctggaaacattccctttgaaaaccagcacaagacaaggatgccctctctcaccactcctattcaacatagtattggaagttctggccagggcagtcaggcaagagaaagaaataaagcgtattcaaataggaagacaggaagtcaaattgtccctgtttgcagatgacatgattgcatatttagaaaaccccatcatctcagtccaaaatctccttaagctgataagcaacttcagcaaagtctcaggatacaaaatcaatgtacaaaaatcacaagcattcttatacacgaataacagacaaatagagagcagtggtttgtagttctccttgaagaggtccttcacatcccttgtaagttggattcctaggtcttttattctcaattctttgtcccatggtctagtgagaagataaataagtaaatgttgatgatacgtattccaaattttaagcttattgtacattggaaacacataaaaataacccagtaatgtgggttacagaaggctgcttggagtgattaattttcaaacaggaacatgaagggctaaaaaagaaattatccaagtgaagaaaggcaagcagaagaaagggtatatgcaaaaatcccagggtcaagagagggtggagagaattgcaaagctttaagctttctgagtgacttaatggagaagggtgagaaattattttgggctggtaagcagggaccagataaggaaggagttcccaagcattgtcatgtaccatgcatgctatcctagggtgaagggaagccattcactaggaagtggggcaatagcattagcagatttgaagtttcaaagggccactgtctgcagtgtgggactggagttgagaaaagggagctagaaggcaggaggatagatctgtagtaatctaaatcactgtagacatgggcagaatattcaagagatgtttagaagctaataattgacatgaattgtaaataattaaatttggaatttaagggaggtggaattcaaagatgagtaatatcatatggtagagggttaataaatatgtgttaaatgaacgaatgaagaaagaaagattcctgaccaaggcactgggtgattggtggtgcaattactgaaacttttcagttaaagaaccatagaaaattttaatttccaaggagcaggaaagagaaatttcattttcaagacatgattacactttttgatggtgtagagctaataaataaatctgagaaaactacagaacagaatgaaaaatagagaaaactgaattcaacttctttgccaaaccactggagcattatgtaattaagctttctaattacactcagttcagatcataattaaaatttgcattactagctttcaaaggttcctctggtcacctaatgctatgatgtctctaagcaacattagtgctttccatttataacacattataattccatgcttttcgcattgcaagtacttaagaaagttttgttgaattacctggtatgatatttgttgaacatttggaactagtttctcttgaataaagcagtagatgaaaatctttcattgcaaactgagtgacttgctcaaggtcactcatcttactagtgccagagtcaatggtgcttcagtgctctttccattgttcctttcagaaaacctgtgacgcattatgaggctcagagattctccctgctcactttagtctacggactgcatttgattatgagacacaaatcttgtgtccactttgattacaattcacaaatttctttgtcctgttctttaaaatcatagtatatgatatatctgtccagaaatcattgtattctaccaagaactagatgccattaaagattgagagaaaatcacctactttctctagaatgttttcttttgcgtctatacaaatgaaacataactaggcaaatgacaagacttgcttctctactgtataagtggttagagcagaggtcttaatctttgctgcatgttagaatcatttgggaagtttaaaaatatcctgacaccaaggcctcaccccagaacaattaaatcagaatctctgaggtgggatctaggcagcagtatttttaaaactcccagatgatttcaatgtgcagccgtagctgaaccataaactagagcaatttaattgaaaatgataaatatgcacacaaagcacctcttaatgttttcattttttcttgccacaaggtggcagcatcacaatatattgcacattctcgcccctctgagtggacgtggaaatttgtatctagaatcctgattaacagcatttcaagagccccgtcagctagagataaagtcgcctttttccctgctgttctctgttgctttgtttgcctaataaaacgttaaaatatatttcaataggttgaattagtaggaactataagcctggggtggaaaaatgcaaagaacacagacattgtattcagttagatttgggtttaaatatggcctctgctactaactcatagatttttaaatctttgtgtgcctcagttgcatacttggaataggaggtttgtcacaaagactaaatgagataatatatgaaaatccactttctacgaatggtagtagaatgatgaagatgttgagaagaaaacatgataatgctgtgatggagtcatttacacaagatccaggaaaacccaggacactgtactcttttatttatagcctttgttttctgcatgtgggtctcttccttctctgtgtgtgtcctatgtttcagtttccagtggcaattacttcttacaaataaacatgttctagtctctttcatttcaaagaacaaagaatcaaagcaaacctttatttttaactacacttctacctttagcaatggaagtatgacttatagctttatagccaagtctctataaaacattagtccttgtttactcacaattactccagttcactttttaaacattgacactgctttctctaaattcaccagtggcctcttaggtgccaagtccaaaaaaatgggtatctcatgtatttgcccatttgaataagctgacaacaccttcctttctgcacccctgcatgttaatttctgtggtggcagcacacctgttctcctgcagcctccattgctcaatgtgggttgttctctcttcccttagaattgtgcatctcagaaattttttctttatagcccttatttcttttctctctgggagtcttatcttccaccacagccttaattttaattatcataaatggctcaattctacacatcgtcccatagagctggcctgagttccagatgtataaatctaacagtcactggaattgaaattggcattgcaaaatcaacatattaaatattaaactggccatatctcctctctacaccaaatctatgcttcctccttccaattcatggcactactttctatccaggttttcatctggataatgagataccttggagtcttttctttctattccctcagcccccttcacatccaaggtgactggaaaatttaatcaatttgcattcaaggtaattattaataggtaaggacttaatactgccatttagctcattgttttctggttgttttgtaggttctttgttcatttcttcccctctttttttgtcttttttttctgataaaataattttctctggtggtatgctttgattccctactttgtatcttttttgtctctaccataaatttttactttgtggttaccatgagaattacaaaaacatcttatagttataacaagctactttaagctgataacaactttttgcttgcatttttaaaaaactatacttttactccaccattcctcccacatttaaaatttttgatgtcacaattaacatatttttatattgtgtatcccttaacacttttttttaaaattttactttaagttctgggatacatgtgcagaacgtgcaggtttgttacataggtaaatatgtgccatggtggtttgctgcacctatcaacccagcttctaggttttaagcccagcatgcattaggtatggtcctaatgctctcccttcccttgcccccaaccctctgacaggtcctggtgtgtgatgttctcctccctgtgtccatgtgttctcattgttcaactctcacttatgagtgagaacacgcagtgtttggttttttgttcctgtgctagttgttagtttgctgaggatgatggcttctagcttcatccatatccctgcaaaggacatgaactcattcttttttattgctgcatagtattccaaggtgtatatgtgccacattttctttatccagtctatcattgatgggcatttgggttggttccaagtatttgctattgtatatagtgctgcaataaacatatgtgtgcatgtgtctttagaacagaataatttagaatccttcggatatatacccagtaatgggattgccgggtcaaatggtatttctggttctagatctttgaggaatcactacattgtcttccacaattgctgaactaatttacactcccagcaacagtgtaaaagcgttcctgtttctccacagcctcgccagcatctgttgtttcctttttaataatcaccattgtaactggcatgagatggtatctcactgtggttttgatttgcacttctccaatgaccagtgatgatgagctttttttcacatgtttgttggccacataaatgtcttcttttgagaagtgtctgttcatgtccttcgcccactttttgatggggttgtttgtttttttcttgtaaatttggtagattctggatattagacctttgtcaaatgagtagattgcaaaaattttctccctttctgtaggttgcctgttcagtctgatgatagtttcttttgctgtgcagaagctctttagtttaattagatcccaattgtcaatttttcttttgttgcaattgcttttggtgttttagtaatgaggtctttgcccatgcctatgtcctgaatggtattgcctaggttttcttctagggtttttatggttttgggttttacatttaagtctttaatcgatcttgagttaatttttgtataaggtgtaaggaacgagtctggtttcagttttctgcatatggctaggcagttttcccagcatcatttattaaatagggaatcttttccccattgcttgtttttgtcaggtttgtcgaagatcaggtggttgtagatgccttaacacattattgtagctattgttattcttagtagtttttttcttttcaccttcatggtaaagatataggtgaattacataccaccattacagtattagggtgttgtgagtttgactgtgtacttatctttgtaagtgagttttacactttcacatgtttttgtgtcactaattagaatgcttttcttttagcctgaagaactctcttaagcatcttcttgtgagacaggtctggtggtgaactccctcaacttttgttgtggaaagactttatctctccttttctgaaggacaactttgtggggtacagtattcctaattgatagtttttttattttattttaacattttgattatgttgtcccatacactcctggcctgtaaggtttctgccgaaaaatctgctagcttgataggaacattcccttaaatgttatttgcttcttttctcttggtgcctttaggatcctttctttgtctttgatttttgttgatttcattatgatatatcttggtgtaatcttgtttgaattgaatctgattagagaactttaactttcctctacgtgaatatgtctttcccaagatatgaaaacatttctgttattatttccttaaacatacttcctacccctttgtctttctcttcttgaactaaaaaatgtgctcttttgatgctctcccataaatcacataaactttctctatttgttttcattttttctcttctgaccatatatttttaaataacttgtcttcaaggctacaaattctttcttctccttcatcaatcctactattgcatttttcattcattcattatattcggcaataggatttctctttgtctttgaaaaataatttcaatctctctattaaatttgttttatttattgttttcttgattttatgaaattgtttccctgtaatttttttgaagtttgttgagcttccttaaaacaattattttgacttttttgtctcttagtttatatatttccacttctcttgactcagccactgggagatttttgtatttttttggtggtttatgtcacctcagcttttcatgtttcttatttccttacactgatgtctgtgcatctgaagaagtaagggcttattccagtctttgcagactggctttgtctgggaaaactctttatcagtcagcctttccatagaacctgtgcatgccatttggtgtcgtctaagggtaggcctgctgttggagtcctcaggtaggttggctgggcttggtgtctgggtgcctgggtcagcaggtgggtgggtctatagggttgggcctaagtctagatccacaagtgtggacctattgattgagtccccatggataggcctgaaacctgggtacacaagggcagacctgacgcctatgtctgcaaatatttgcctacatctgtagaggctggccttatccttgggtccacagggggctacttggctctgggattggctttgagtctgagtctgcaggaaatagtcagttactgggatggatctgatgtccaggattataggggacagcccagtgctggagaagttccagaggctgggctgctaaggtagacctggcagtagagtggcccagagaccaagtctgctgtatagaccttgagtctaaggctataagcccctgatcagtgctgggaaaggtgtggaagctcagtccacaagtactagcctggtgtctagggctgtgagggtctctttggtgctgggtttttctgtggcaggcccagtgttggggtctaaggcaaagtctgatgctcacttccttctcctaccatcatgtggagggtatctgtctccatgctgtgctgtctggtaattgggggaaaagtgaagcaggtaatgtgaaactgtccttcctctctctccagtgcatcttttcttgtttccgtgctatacccaggtgctgaaatctctcacctggtttccttcacttttgtgaaggtatttttgtgtgcggatagttgttcaaattgatgtttctgtgagagagggagcactggagagccttattttatcatcttgctgacatctcctcaaatcatacttttaaaaggcatttatttaatctgtagtagtatattatttaatttctgtttgagaacacagacatagttcctgaaacttgctgaagcaatttttaataatcaacggatagtacatcacaaaatgccatatatctacattcagaaggcaatgaagtttttggtaattggaaaccaggtcattgcttaatgcatagtaaggtcacattactgagaaatcataggaattaattatatctaatcaattcttttgataattgtgcatattgcaataatattttcattattttggcgattgttggtaagactatttgtgaaacaaatactgagctccattttggggtaatgaactgctgttggtgccacagagaatataaggctttagagaaaaattggacatgctaaactgtgccattagccaaataaaacaataaaagtgcatatcattttgtgcttcatcagagtcattttaccaaaatttttattttctaattaattggtgaaaatttaacaagtcctagtcatcaaattaagaaaaaaaaaattagaaaactctatgtgtagagattcaaggaaatataaaatcaaaatgttgtatatttccttaatggatttcctgttctatctaattttgtactaagatatacccttcttgcttaaagcgttttaataaagcatgcatcttttgacaatcatctaactgccaagcttaataagaaaaaacaaagcatatttcagtaagatataatatcatttactttgatccagatgttgaattaataatgagtgcacacactgagatacagtgctatttaaagcttttgttgacattttaaacaaggcagcagaacacagggagatccttaattaggacaaagcagacaaacaccaacaacttgatggactgtcatatggttcagagcataagtgttagggaaaaatgtcagttcagggctcaaagaagaatcaaaggaacaactttgtacaacttagatttctcatatctggtttttatctctttagagattcatgtgtttagaggtctttgatgtccatgatactttgacaaaaaagtgtttaagaatgtaagtgttgactgcttgtatgatagttgccagctctagctgtaagtgtagactgacagaaaattggaacagaaatcagtgtgtggcaggcacaaatttgtctttaatgaatatcttttacaggtgtcaaattatccagtttaatgtttcttcaaccataagaattccattattctgtcttttcccataagagaccataaatgtattcatctgtcactaattaactctgtgattgtgggcaaatcacttatgctttctcagtttctatattctcatttgaaaattgaataagggtggcattagataatctctgaactttcttttaccactaatatcctataatgctgttgaaaaagatacttcccatgtatctttgaaaattatctcaaagattcagtaaaaaataaattcacacattttactcaatgaatattacttatatatatgggataaaatgaatgaagtcacaagaaagggcaacttttttttttttttagacggagtctcgctcagtcacccaggctggaatgcagtggtgtgatcttggctcactgcaagctccacctcccaagtttatgccattctcctgcctcagcctcccgagtagctgggaacacaggcacctgccacaatgcccggctaattttttatacttttagtagagatggggtttcactgtgttagccaggatggtctcgatctcctgacctcgtgatctgcccacctcggcctcccaaaggcctgggattacaggcagaaagagcaacttttaccttcgaaagctcaattaggaattgaacaggtacttgttaaagagatcgctttagtagaaagtcatggccaacagcaagaactccatagaatgcccacagaatccatatttttcaactatagatttattatgcagaattctactcttgtctgtactgtctgccaacagccatattttatagctgaattttacgtttctaaaaatagagaaaatggaaggaaatgctgacgtgctgtctcagagaaggaaaaggtacagctgcaattgttgaaacctcagtggtagaaaaacattgcaattcagttgttttctttgtcctcaaattactgtataccttagatctctaacatgccatgtcacaacattgctatgtagagtgtccacatatttattctccaaaccacaacacttaaaggagcgaagggcgtaagtgctactaataattacaaggacaataagcataaaatggaactattttgtacaaactgggaaatatggtcaccctattggcttatgtttctatttcttgttttacaaagatgttcactttaaatattgttttattagtctttattttagattcaacagtattgacacttgctctggattactctttaaattgggttttaataaaagtttcatcattaattagctatatgacttcatgatatattttttaaaatttccttgaatcttagtttcctgactgtgaggattattaaggtctatataaagacagcttaacatatggtggtttctcagaaaaaaagtgacttcctttaactagatagagaacagtgtttttttttttatcaagttctcagagacttgagagagtagatctgagatcattatagtttttctagtgtcacaattgttctatggtttctttccttttaattatattggtgttgaggatctttttctacattttattcaattgtttaggtgatgtctcatattaacgtcctccaccgaagatctatctggatctttctgggggtgatagcaatttaaagtttggaaagctttcaaagggttcagaggcatgctttctatcatgcctttctggtgccctgcgagtcaaaatcctcatgtgcttcatttgcaagaaatggccaattactagctttttgtgaaattctacttgcttgacttctataacattgcaatattctcatttttcatgtatttctttagctattctcttttgccttagtgaacttaccttcctctgtccaatctttaaattttaatttggccatttactctctatacccacatatcttccctgggtgacctcatccactgtcatagtttcaacaaacatcacttgctgttagtctcaaatctatacacatctctagccaacagcattcctctgaacttcagattatatacttaactttcaaatcatcatctcttctcacataacacttaggctcacctctaccaatctcatttccccttttccattctctatttctttagatggcttcaccaacacgatcatcttcccaggtactcagcttagaaattggggactcatattcttctctcccatcacatatgttcaatcaaaaaccaacttctaccaagtttatttattaacatttattaattattcctgaatctgtgtctttcgttcaccctcatctttttttttttttaaccgcagtcagaactttcaatatttttttatagatcgtgcaatggctccctacctcttctctctgcttacagttacatctttcttcaatccagctgtaaatttcactgttccgttctcttacattcctcagtggtttctcttcttctttcttccgtatcatgataccctggatcatttttttttttttttttttttttttgagacagagtctcactctatcacccaggctggagtgcagtggcacaatctgggctcactgcaacctccacctcccgggttcaagcgattctcctgcctcagcctcccgagtagctgggattacaggtgcctgccaccatgcccggctaatttttgtatttttagtagaggtggggtttcaccatgttggccaggctggtcttgaactcctgacttcaaataatccacccacctcggcctcccagagttctgggattacaggcatgagccacagcgcctggccccctggatcatccttgatccaccctttgtctgacccttctgcttctctaagtacagctcttatatcttgtcacttctgacgacatgttttattttactgtgacaaaattccttcttgttttcttggcatgcatgtacacacagagaaacacatgcaccaccactaccactaccaccaccaccaccaccacccctattctgttttctacatactgtaacttggcttataatgtgctcttggcatggagtcacttttttcctccttcttttatcttgacaacctcccacacatctttcgctcactgaataagcatcactttactccaggaaatcaaatctaggctttgttaggacttctccaccctgttcccttagaccatatacaggtttctatcatttatcatgttgtatactaatgatctgttttgcatcagtcttaccccagtaaattgtgaactccttgtggtcagcagtcaccttattcaattttgaaatctcagttttttatatagtctgccatgtgttaggtgcccaagacctttactgaatgaatacatttaataaagaaataaataaattctagtatttattaattcacagtgaccatgtacttgtttgtgtttttttcctcatttaattgaaacaatttggacatgtttcatcagtataaaattcatataattgaccaccaatataaattcatatgaaattaaccatcaataaaaatgtgtctaatccattttaagttattgtttatgcaatccatataaatttgtgtttgaatttctgcaataatttcaaccaaggaagttcaaatcttccaaaataatatgaaagaagtttacagtcttttgaaaaaatattcaaagggtgaaagtcacaggccctgataactgttcatatactatctttaatgtcctcttatccttcatttctcacatctcaattactcttatctgctaaactctcctaaaatactctctcaacagacacctctggggcatttttctttatccccactcctcatttattttttatttagattgtcacttagcaaaagaataattcctattaaataagatagggaaagagcacaagcgagtgctcaaataccaacttctccttagcggaaggaggcagggaatgttttgaactatctcatcctgatgattgctgcccagcacttatacgtgtgtgttgtaacattgctctctctggattattggtcaattattcttttatattgtcacatagaagacatctgtatgtgaatgtgccctttcactggaggtgacattcgcatttcctcttcaaaaaacaaacaatcaaaaatctgaatatgtagtaaatttgcagaggccgtcgaacaaatactataaatcaagtggtttaaagcagccctcttggtttgttgaaaggaaaaatcttgaactcagcactttgcattctctcttgtagtttgtttgtgattagtgtctatgtactttgtgctttatatatcagcaacagctgtacactgaggctcctagggaaacctcctgaaaatagctttgttgcaaaaagaaaatggcatttatgaactttggcaggaactgtactcttgagccatgttcaattttaaaacttgaatggaaaaatccactgcatggagaagccagccaggcaggatcatgagctggatctattgttagaagaagaaggaggtgccaacagctcagagggctctgggggctctgagagcttatgtacactgtgtcctgcaggggtcctggacaaggtcgcttggatagcggcctaaccacagcattatacatgctcaggaagaggcaaagccggaaatttaccacttggcaaagcgtctttacaaaaccagagtttggctttgtggtagcttccttaggtaatggtttcacaatttttcaaaaataacttcattttactcattcactcactaagtcagaatgtttctattatttgagagtcctttatagaggtggaaggttctacctcagtcaggtcctgagagcagtgcctgactatcccagtcctgtcaccttatatacgttcaatgtgttgtgttcttactattgtctggggtggtgtgagagtctcattttgcttagttgtcagtgctgacggctgctgagagctgctcagccagccacatctgaattgcagtaggtgaggtttacagccttctgccccagtatcagtcaaacgtgctaaaagaatgtctggctccgtgagtagttatttctcaatacttcagtattatgctaagttacttcaccacagccaggcaaagtcttctattttcatagccagatactttgcaggatgtgaggccccagcatgccagggctaggatgaatatttgtgtctgtcatgattcaagctaccacagattctgcatgaattagagaagggtcactttagcccgagggtgctgttcatgagccaaaaagctctcacagaagccagaagctgtctctgaaaatcttgtccagagctttccttactataatagccatttttgaaaggtctgtgtcctaaaggggttgcatcactcttattgagtgactcttttagtttttcacaaaaactattgcttttggagtattggacggggtagcaaaaacttgatagctcttctttgcgcttaaaccggtgccagccagtgtagcccctcagcctcctctttctctacctcatggtgatttatttttccaagagccttttttttttctttccatatcacttggcctgaattggagctaccctagccgccatggtagatctcccaaagcctaaatatcaggaagaagaggtcagagaatttatttgagattccactttccagtaggcacgcaggtttgtgaaaatccctccttttccacatttgaactccacatgggaagagaaatgctggctctataagtcagactgaaggccctattgcatcatttctgctagagaggactaaccaagggccattcagggattcaaggtgacctacctctacagtcatggcagcttctgcaggttaaaacaaataaacaaacaaaccaaaaagcttaaaatcgtttaagtatagggcacacagcaatatataaagacattctatggtatttcatgaaaaataaaaaggttgatttgatctcaattttttttatattgaggactagtactatggtctgttgagaaatataaacttttctttagggaaggtctaaaaatagaacaaaatcttattagcctagaagaattttagcatggttctgttataaggcaagtgaatgaaggaaaagtagcttctgggccattgtaatcaagtgttttgtctgttttttaaaagaccagtcattaattgcttaggcgtgggttctaaatcagaagatgtcggaaagtgagctctcgggatttgcgttctgctgcaaatattgcagcaatattgggtcagcagcaaatattgcaatatgaatgaatcctccataagtttacaggaaaattttaacttctgaactactgtaatttcctcataacttatatacggttgaaatcaccgaaataaatgagggcaaggtattctcgtgcattgtaagagtttagttatgtttacattatcacacaaagattattttttgtttttattcggcagcctccacctcagatatatgacaagcagttggatgaaagagaacacacaattgaagaatggaaaggtaagtctactacttaaaaaagtatactttttattttattgaactcagaaagtatcaacaaggcttttccttgtaaaacaatttactaaaaaatgatttgctgactgctattctcttagaccatttttaaagctcctaaaacttcatctgtcttttcatgccgaaagcaatgtcacatttgctcaagaatgaaaggcatttaccattgataccttttaaaatggtactgattgtcagtgtttgtcgataccttttaaaatggtactgattgtcagtgtttgtcatggtggggggcaagctttagttcagaattccagaatacaactttctatgtttgtacataaaatcatcatatgaagcatgaaattaaaattaattctgagatggttttagactttagaaaataaaagatagtcaatatatgagtttactcattggattgataagacttgagaatttacatagaaaatatgtgtatctgagtagcctattaatctaatctactaatctaaatcactacagaatagaataaatatgagaaagtcaaatgcagattgtagcaaatgatcagatcaaaatgggaagagctgaagggaaggaacatttgagctaccttgcaggaattaataagtgtaaattaggaaaagaaaaaatattaagaaaatatcagataaaggactaagaggaaaacaaaggacaggaataagcagaaaatgttataaagatactaaacagggccaggagcgatgactcacacctgtaatcccagcagtttgggaggctgaggctgggggatcacttgagcccgggagttcagaaccaacctgggcaacatagggagaccctgtctctgctagaaacatacaaaaattagccgggcatagtggtacacacctgtagtcccagctacttgggaggctgaggtgggaggatcacttgagtccaggaagttgaggctgcggtgagccatgattgtgccattgtactcaagcctgggtgacagagaaagtctctgcctctctctatatatatatgtaaaataaaaaataaaataaaaaaattttaaaagatactaaagagattccactggtccagagattccagggtcatgttggtgaatatggaaaaatgaacatatacaaaaagtggatcaagtgaaaaaagatgcttgatatagatgaaaaagagttgctttgatccaagtaaggacaggaaggcactccttaggggctcatgaataggtgggtgataggatataaccatcatttgaggaggacatggactaaattgtgagaaattggagaaagaagtacatgtaaaggatgatgattatacagattataagccattgcaaagcaagaatgagtagggcggaatgatttttagctaaagggacagagtaaacagaactgaaactatccaatttaactctagcattcagaaagccaaaaatggatgccagtctgagagtaaatgaactaaattttttaatgtgtttggtttttggcaagtttagatttacaagtccaagatatgagtctggaaaaaaaaaaagatgcagtaagagatggaagttgtaaggattggtaataatttaaagtcatgagaatgtgtgcatttcataggaaataagtataaagaaaaatggatgttcaaagccataaaaattgttgctagattgagctagaatgtattagtacttcccccaaagaattcagaaaacaagtaaaacatgtattacttgtttcatttatgtagaaatatttcatgcatgtagaaataaatgttatttatgtagaaatgtatgtagaaataaatactatgtatatggaaataaatagtatgtttcatgtacgtagaaataaattttcatgcattgatttcttcaactgctttactagatacctatttgtgccaggctctctgctaattacaaggcaatatagaaatagaaatagagcagtaaaggaatctcaattgatttttaatttactcaaccccatcaaaacgtaattatttggcattaagtaatgaatttccctgtggatgaaggataaatttgttttctataataacacagctgtttcttacagaacttatctacaaggaagtaatgaattcagaagaaaagactaaaaatggtgtagtaaaaggacagccttctccttcaggtactcactctccgtgaataaccaataaactagtacttgtgtaatttcttggcctttgtgtaggggttgcaagaaataacataacattgcttaaagagcagatggacaaatatcacatggttgtgtccttataatgattttagttttatttcttttgatattcagtgtggcattcattctgattattctgatggtaatgatccagtacaaaaactttttcataaataattttaatagtaatgaatcctgaagaaaatgttaacatgggctaaagggtaaatgtgcctcatcaaaattcagagccataatgcccttttgaccatcaagtcaatgtggagctcagtaatcctttcagccgctacctcttccctcattcattcttagtgtttgaactcttctcaaggttgatgtgacaatagttgaaacatctaccaagatgggctccggttaaggtcagcttggaaaatttttcgtttgctagccacagaatctaatacacaattgtgcatatatattttttactgatcctagtaatgtgctttagtatgacttgagacaatttacttattaatgctaatatattttttcctaagacctatgctctcactataaagagttttagaaaatgtgatggtttattttcagctttaaaaactacattcaactcctgctagcaaaaatgggggctacaaatgcctagttttgagaaaaactgattagggtgttgttttcctaaattattttaggaaaaaagatgtagaatgaaataattaatcaattattcatatcgatactactcttcgaataactaatttacaccccaaaccactatgatacccaaacagatgcaattcggttatgacatgcttttctcaccagtagacttgaaaaaatactcagttttatcccaagtttttcccttcctcaaagaaggttaagggaatcacaggagttgttttccataccaccctctctactcattcaccctcgcatacagattgacacagtccacagaagctgcttcaaactaatccacgtttggcctgttgctcattaaaaaacttgaagacagaatccaaaagcctcaagatgccacctgctaaggcagaatgactccttgttttaagaattcctataatgaccagaacatattgtcatgtactcattaagcagcagaaataacagaatgtagccacgggtaacctagcatgttaggctgggcctggacaaattttagtagaacctattctattcatcttcagttcaagttatcattacttcatttccttttcataccaccttatcccaaaagactttttatatcttcccaaataataggatctttcctttctataggtcctactagtccctgtatgttaaatatttgacctcttgtcttattatcccgtattgattgtaatttcattgagaagactgtatgcatttatctttgtgtcccatgtagtgcctgggtgctgtgccttgcacatagtagtagctcagtaaatatatattaatttgaaaattgccactcaatttctccctcagcatatttcttagtactattccaaacacaaaattcaagacaagatcatgtaactttaatacagtatactattcagcatgttcttacaccattattataaatatttattcactctattaatctccatgaagataaacaggccaagcataaagtatataaattcttgctattggcattttttcatgcttcacataaaggtttgcagctttcaggtgtttgatttattcattttgggaaatatatattcatggatgttttgcaggcctgcttagtgtgttaatgattaattctaaaatatgcaacttaggctctacctgagtgagaaggctaagccactttttaaccattccaactaccttaacaattaaaaattatctatgtaatacatatgccctaaactatagttgactggcttaaccaatttatagttaaaatgattgtggattaaatctaggaaaaatattcatgacttagttataagtcatgtagtatgactttctctttcgtgagaaatcatatgtatgctacacattatgggatgcatttctgtatgacatatttatgtgcatgatggagaggctctagggcagccatgtgctggcgctgactctaccagctcatgacggccaactctgtacctctcttcccaactatgcatttattgttggtgtgttggcaacgtgaaatcaggcacgaaggatttacaacatggaaattggcagaccctacaaatcagggcgtttttgttgccccctgcagagccaattgttaaatttttattggcgcaccactgtgtgtatgcgtttttgtgtgtataataaactatgctggaaagaaaaagcaattctaaaaaaaagtttgaaaagtcagcttttttgcattgttcattatattcagctttttttcattaatgttcacgtagcatattttattttgaaaatagctgtggtatttttataacacacactctgttagtattcagttatggcaatactgggaattctgcagcaagggagtaagttaatgcagtatctcaggggccaagtacttctaatacgaaacccatgttatgcgatgcttttaaaatgtaaataggaagttaaatgtgcatttgcagaataatttataggtttgaaatttattgatgaaattgttgtatgtcaataagagataaatctaaacttcagatacatttccaaataaataattgtattcccttctgctatctgatttcacttgcatagtaatttattttcaaggatggcatagctgcttgcttcctgaattgatctgtaacaattgctgagggactagcagtccatgaattgaaattaattttcttctaaaagcatttgttatagtacgttagaactagaaaaaatacaggagagcatctgattcaccaattctgagtttgttcaccagccctcttccacctgagaagtaaagctcccaaaactaacagtgactcactaagataaggatgctgaacaacaggatgggcagagatttttcaaaatctctaaatcaaagataaagcttctgggtgattttaatatgcaaccattctctccccagtgaggaccacattccccaccatgggaatatgtcttagggtcactaatatagtccattaattttatttactttttattaaaaaatctcaggcccagacaaattgtggctcaagatcatgtagataaaaaagacactattttttcattcttgtgctttttctaattctgtgtctaccatatttttttgttgttgttgggattgggggttatcaggaaaatcattgcctttaaaaaaagcagaacaacattttcccccataacaatgttttttggttgaataacttgtagctgagaaattttctttagcatatgttacttctttctatgaaatctgattttttaggtaaagttgaaggtagctaatattcctcatttgcaaccctattgacattttcagttccttttaatgccatttttatagacaaaaatttgtaatgctttattgatggcaaaacatttttgaaaatgtgtatctctactgttttctcttaaataatatagaaagaagagatatttctcacattgactggacaactgaacacaatgatcatattcaattcagttcaattctgtttaagagattttcgcaaactgcttggcagtaatttaacaacttaaagccaaggcccatgtcttgtcccttacgtttgtgtttgggtttatggtttagaactcctgtttattgcctacatgaaaatagacttgaatggatcatccagcagaagtggctgcaggcaaggaggcatttattatagcgcaatagagggagtcatacagaagcaaatagttttcatctaatagtggtggactggttaacatttaacaactatatttaaaaaaagaattgactagtagcacttaacaattcctgtggtataaatattctcactgtgaccaattttaagcaacaatgtaacatcaatggatgcagagttggaaagagatgctaataattcgttctaagaagccactaaaagccagctccaggacaccatagacagtgcacggttctctcccaccatcacactggatagcaaggaaccattcccatgaaacaagcagatgtcatgggaacttttacaaaggaagcactgaagacttctcttaatgaatttgtgccatataaaatcagaagcaatagtctatggatccctagaaatacagctgataaagactttgatagattttgaactttgagtagttgaacactaattatatttgcattcaacattgataaactagagggcaggaccattccaacacagaggataggaattagagagaagctgctgatgaacaaaaggagaagaaagacaactgcaacaaagtgatttcctttggccaaaaatagcttaacagtttcactagttggaaagcaggaaggaacttgcttttcctcacagaacctatctagaagagtacacataagatactcaatactgttttgttaactcgaatacttactctgtgctactactcagcagtagacattgtggaagacaggagaaatgaagtataatgaaagcagtaaaaagaagcaggggaaatatatgcttgaggtaatccataacaaaactacatataataaggggctgactggtatggcataacactcggaatattccagaagtgtgctgaaaatatgctgattttgaaaataagtgcagtaggagtgctgtgtgttttataagcatagcctgcagcacgatcctgtttatgaagagcttattaaaagctactttggcttttgttacatacattcaatattatttgtagatataaatttgtgttttggagaaatttcttcaatgctctttgtttaatttctctagctgccattgttgtgggtttgtgtttatttgtaaacatcaaattgttttactataagggagccttatttcagctaagacttatctcacccttatttgaatcattactcaactttaattgtgacaataagaatgtgtctacataatcaactccagccaggataggggaaaaagcctatctcaagagaagaccaagattattattaaagacttaaaaatactttttggtttgtattatgccacaattttattttaaaactttttaaagttttaaaactggttattttctcataaaaccagttatttttaaaactggttattttctcataaataaagcatgctatcataatcgcctggttccactggctttctagttaattacaacattcattttatatatatatatatatatatatatatatatatatatattcatttgatctgtttttaacatccaatccactgacactgaaacttcttattcaaataagtcctcagtataattgtatttctacacattagcaatgaacataaaacaattccatttagaatagcatcaagaaatacatatttaggaataaagttagcaaaagaagtacaagttttgtactctgaaaactacgaaacattgttgaaagaaattaaagaggatctaataactggaaaaacatttcattgctcatggattagaatatttaatattgtcaagaaatgacagatactccccgaattgatgtacagattaagccaatacttatcaaaatcatagctgtcttttttgcagaaattgacaagccccatcttaaaatttgtgtggaaatgcaaaggatacagaatatccaaaataaccttgaaaaacaacacagctgggaaatttacatgttctgatttcaaaacttactacaaagctacaatattcaagacagagtgctatttgcatgaagatacacaaatagatcaacggaatcaaattgagagtccaggaataaatacctacatttatgatcaattgatttctgataaggatgtaagacatggacaaagaatagccttttcaatatatggtgctgggatgattggatatatacatgcaaaagaatgaaggtgggcccctgcctcatatcatatacaaaaatgaactaaaaatgaatcatagacttaagtataaggtctaacattataaaactcttaggcaaaaacataggagtaagtttttataatcttggattagaaaatggtttattagatatgacactaaaacacaagtgataaaagaaacaacagataaatgctatttcataaaaattaaaaatatgtgtgcttcaaaagacaccttcaagaaaatgaaaagataaaccatagcatagaggaaaaacatttgaaaatacatatctcattaagtaacttgtacccagattatataaagagctcttacaggcctgtcacagtggctcatgcctgtagacccagcattttgggaggcagaaatcggaagatcacttgaggccaggagtttgagaccagcttgggcaacatggcaagctcctgtctctacaaaaaatcttttttttaattagccaggtgtggtggtatgtgcctgtagtcctagctacttgggaggctggggcaggagaattgcctgagccctggagttagaggatacagtgaaacatgactatgccactgtgctacaggctgggcgactgagaccctgtccttaaaaaaagaaataaagaagaaagaaagcaagaaagaaaggaagaaagagctaaagagcttacaactcaataataaaaagaaaataaagcaattaaaaaatggccaaaggagctgagtaaactttctccaaagaagatatactaatggctgacaagcacatgaaaaaatatactcaacattattagctatcaggcaaatgcaaatcaaaccacaatgagataccatttcatgcacactaggatggctagataaaaagacagataataagtgttggtgaggatgtagagaaattggaatcctcatatactgctggtagtaatgtaaaatggtgcacccactttagaaaacagttttgagaggtgagagcgtgctggcagtcctcagagccctcgcttgctctcggcacctcccctgcctgggctcctactttggcggcatttgaggagcctttcagccccccactgcactgtgggagcccctttctgggctggccaaggctggagcccactccctcagcttgcagggaggtgtggagggagaggcacgagcgggaacccgggccgcgtgcggcgcttgcgggccagctggagttgcaggtaggcgtgggcttggcgggcccccgcactcgggacagccagccagccctgctggccccgggcagtgagggacttagcacccgggccagtggctgcggaaggtgtactgggtcccccagcagtgccggcccaccggcgctgtgctcgatttctcgccgggccttagctgccttcctgcggggcaaggctcaggacctgcagcccgccatgcctgagcctcccacccactccatgggctcctgtgcagcccgagcctccccgacgagcaccaccccctgctccatggcgcccagtcccagcgaccacccaagggctgaggaatgcgagcgcacagcgcaggactggcaggcagctccacctgcagccctggtacgggatccactaggtgaagccagctgggctcctgagtctggtgaggacgtggagagtctttatgtctagctcagggattgtaaatacaccagtcagcaccctgtgtttagctcaaggtttgtgagtgcaccaatcgacactctgtatttagctgctctggtggggccttggagaacctttatgtctagctcagggattgtaaacataccaatcagcactctgtgtctagctcagggtttgtgagtgcaccaatcgacactctgtatctagctgctctggtggggccttggaaaacctttatgtctagctcagggattgtaaatataccaatcggcactgtgtatctagctcaaggtttgtaaacacaccaatcagcaccctgtgtttagctcaaggtttgtgagtgcaccaatccacactctgtatctagctgctctggtggggccttggagaacctttgtgttgatactctgtatctaatctgatggggacgtggagaacctttgtatctagctcagggattgtaaatgcaccagtcagcaccctgtcaaaacaggccactcggctctaccaatcagcaggatgtgggtggggccagataagagaataaaagcaggctgcccgagccagcattggcaacccacttgggtccccttccacagtgtggaagctttgttctttgctctttgcagtagatgttgctactgctcactctgggtccatgctgcttttatgagctgtaacactcaccacgaaggtctgcagcttcactcctgaccccagtgagaccacgagcccactgggaggaacgaaaagctccagactcgctgccttaagagctgtaacactcaccgtgaaggtctgcagcttcactcctgagccagcgagaccacgaacccaccagaaggaagaaactccgaacacatctgaacatcagaagggacagactccagacgcgccaccttaagagctgtaacactcaccgcgagggtccgcggcttcaatcttgaagtcagtgagaccaagaacccaccaattccggacacagtttgtcagttcctcaagtgttaaagctagaattactctatgccccagcaattccacttctaggtgtatacccaagagaaatgaacacatgtccatacaaaactcgtgcatgaatgttcataacagcattatttgtaatagccaaaaagttgaaacaacctaaatatccatcaaatgcctatcaactaataaataaacaaaatgtgatgtatccatacaatggaatattatgcagccatacaaagatatgaaatacagatacatgccacagcatggataagccttaaaaacattctgctatatgaaagtggccagtcataaatgatcacatatgatatgcttccatttacatgaaatgttcagaacaggcaattttatagaggcaaaaagtagatgagtcattgcctagagctacagggtaggtgaggaatggagtgcagggttttctttagggatgatgaaatgctgcaaaatggattgtggtgatggctgcacaatgttgtgaatatactaaaaaacactgaatcatgaaaattaaatttcttaattatatatgtggattatatcttaataaagctgttacaaaaaatatatgagcatcattctatacctcaagtcaaaactaaattaagctgtagcaccataatttgaaaggcatccatagtctagggatatgtcatccagcagacaaatagtaagaaaaaagcaatttccctctgctaggctcacaattgatcaggcctttataatagagtcctgtgtccagttttaatctctgtcttttaataagagtgtggataaatggaagagaattctgaggagtccatcatagtgacactaaattattagcaacttatgaaagaatatgaaggatattggtataatttaatccagaatcgggggtgaaaaacagagcagggcatttgggcaatgtaaaggaaccaagggctgtctgctaggagataaaatcttatcatgaggggaaatgaaccagctctgtaccatagctatgggggatataattaagtaaagttggaataaattaaagccattcaaagttggaatattatggaatattataactttatacattgtcctgatagagtaattatttacagaaagacaataacaggaggactttaaaaaccttttctagagacatttaagattagaaaggatgggtatttttaggagtttaaagaacatgaaaaattcataagcttttctgtatataaaaatatcaagatcccaaaaaaatacatattaaaagatcacgaccagggaaacttccaggcaaaaagaatgaccgggaagaaatatatgaaaagtttaacagttcttaccgtttatttgaagatcggtgcatatcattatctttatttcctatattttttcacatttcccatagagtacgtccatatatttatagtcaacaaatacaacttaaaaatacatggaagatacaggtgatctgtcttagtttaggtgtttgtgtcctctctagataactgatacattttcatcacacttttctcacaggcaagaaatgtctactccaggagcaaggattatgttaaccactccccttccttaatttagttttattttgtctttctgatttattaggtctatgtgataacactattataactgactttggagttattatttttcaccaaatagatcttgcacactatatttgctcaaataagatataattttagtgagaattcctcatctcttatttgattaggggactatactacagatttttaatagcgagctatttcacaaagcaagtgtgttaccactcagattgcttaggtataaagaatatacaaagaaaaaaagtaaatggattgtttccagggtgctctggtttaattgtatcgcacaatgcctttggttcatctttcttttgttgatctcaaagctactggcaactcagctagcctttactgagtgattaccatgggcaggtttcttctcagggtttcaaccttatactcccgcataacagataaacaattttttcaagttaatctaagttaataatttggagttcttatttggagatcccaggtaagcaagcctgctggagagttagctcataagcaaaagctgtgctaaggcttctcctattttttttttttttgtaactttcatcaacagtcctacttatgtcctactggcttttctatatgcattttaagtttggtgtcattaatgatgacataatagtatttatatatcttcctttctctagagatgtggtccccaagtaattcagatttctgaacttcacttcagcttctatttctgggataggacccttgcatatgtttgttttaaaagctccctgcattaaaaacaaccaggctcagatggctccattaaggggttttgcttatttgtctcctgcataagccagaggctttcaatgcttggctgaatacagtctctgaggagcttttaaaaaatgcaaatgcccgcggggcgtggtggctcacgcctgtaatcccagcactttgggaggcagaggtgggcggatcatgaggtcaagagatcgagaccattctggccaacatgttgaaacctcatctctactaaaagtacaaaaattagctgggtgtggtggtgcgcacctgtactcccagctactcgggaggctgaggcaggagaatagcttgaacctgggaggcagaggttgcagtgagccgagattgtgccgctgcactccagcctggcgacagagcgagactccatctcaaaaaaaataaataaataaaaatgcaaataccttggcctcacccaaggccaattatattaaaatatatgcagtgcagtgggggcaggggaggcaatgtgaccagatattagtgttttttaatagaaagtgttgcaggtgatttcaaatatagagtgagatttgataacttgtgatgaaggactttttattgctatgtcttgattgtcaccatttgatatgctcccctatgtcagctgctctataaaggcttgccaaatgattgatggactggacatcccctattgtatttgcccatccctgaatcctgaatggcattaagatgggtctggttctagattgagtcatgttggtcttcattttcttagcacaggtgcagcagtgaacagcagtgagagtctccctccatcctcgtctgtcaatgacatctcctccatgtccaccgaccagaccctggcatctgacactgacagcagcctggaagcctcggcaggacccctgggttgttgcaggtgactagccgcctgcctgcgaaacccagcgttcttcaggagatgatgtgatggaacacacacacacgcagacacacacacacacacaaatgcagacacacaacatcaagaaaacagcaagggagagaatccaagcctaaaattaaataaatctttcagcctgcttcttccccagggttctgtattgcagctaagctcaaatgtatatttaacttctagttgctcttgctttggtcttcttccaatgatgcttactacagaaagcaaatcagacacaattagagaagccttttccataaagtgtaattttaatggctgcaaaaccggcaacctgtaactgcccttttaaatggcatgacaaggtgtgcagtggccccatccagcatgtgtgtgtctctatcttgcatctacctgctccttggcctagtcagatggatgtagatacagatccgcatgtgtctgtattcatacagcactacttacttagagatgctactgtcagtgtcctcagggctctaccaagacataatgcactggggtaccacatggtccatttcatgtgatctattactctgacataaacccatctgtaatatattgccagtatataagctgtttagtttgttaattgattaaactgtatgtcttataagaaaacatgtaaagggggaatatatggggggagtgagctctctcagacccttgaagatgtagcttccaaatttgaatggattaaatggcacctgtataccaatttgtagaaagaacatatgtgatacttatgtaaagtgtggggcgagtgggtaacagttttcaggcacaaaatggtttggccttctgaaggcaggtgtgaataaaagctgagagtcttttctgtgacagtaaagagtaggagagactggagggtagtgtgtggtgtggactaagactgaaaggaggttattacccagatactaggagacactggtgtccctgttttagagatttggctctatacccatttgtcatttctcaattactggtcacaacaagaggccactggagaaagtggcaggtggtgaagcaaggttattgtgtgtgcttttgatgataagaatctctctctggaactgagcagaattgcctccatgtgaattccttcaacaaaaaaatgagcctgcctagactactttcagattgtggattgtgttttccatgtgtgggctgcttccctgattcatactctgccaaagttttattttgagaaataatattactttcctcttctgaaataaaataataataataataatgaaacccccaaaccacagtgtgagtctcaggttagcatttgaaaacatctccagagacattgttattcctcaggagtttccctgactccttaatgtggctgatgtttcatgtttatttatttattttaataagtatgagcaatcgaagggctgatcatctgagttttgtactgcagtagatgtaagagcaataactctgcccataaatttactgctgccaaatagttttagcaatatgagtttgtcttaaaagccatgaagcattaatgtcaatgtttagcaaaatctccagaatttagcttaaattaaattaaatgaaagtgctttcctgagcacttaaggaggcactgtgaaacatcttggttatgtacaaggcaataccaaggtgatctcagcaataatcaggcttcccttcttattcacttcgaagtatccatcacagttatttgcactctgaccatgttggtgctcactagagtggtgatatttcacctgaagaagtgaaagacaggaagtggatggttgatgagtgtgaactgattggcaaatagaatatccccaaaacagagcaaacaagaatgccagtgctctgaaaactgccttaaatataataatagggaactttctttctctcttcaagcaatagagaccacagggaactgcacccacctgcaccatcgccatgccagtggtgctgccattctgagattatttcacacagtcagattcagtacacgcagtcatttgtttaaaataaatagaagaacattcctttgtgcagcttgtcccctggaataaaaatggcccattttctctattttgctaccattttttttctggttaatattgcagataacctgattgttaaaaatgcctcctcagtcacttgagctccctctctttcatattcctgttttttttttttttttttaaaaacttctcctctctgtatctctaattctttactgattttctttctcggtacttttctcttgatatatctgtggcttctcccctcccttactttataccacatgggattaagtgcggagagcaggaagctgctttaaagagagtctcaaggggaatttcatcagccgcaagatgacatcacaagacagaaggaagtctccagccagcatcttcaaagtgcttgacaggctatctctcgtacctgcataagtggtgaatttccccctcagagtaaaccaggcaagaactagacagggcccctcccccgctgttagtaccttcccaaagctcaattagtcttacatcttctgtgcatggctcttgggagctggttagctttagccagatttcccttatggacaagagaaaaatggaacaaattccttgaatataagtatcatttacaaatagaggtaaggatttggcccccagaatttttgcaggatcagttttattaggtgattaaagcaaggcagatgatggaacaacaaagagaatcaccactgtaaaagccccccagtcctttgcccactaggtctgctttcctataatatgtctaggaggtgatgatattatcaaattcacagaatataatatgttctgcattcacttgtctgtcttaacacacacacacacacacacacacacacacacacacacacaccccaaatatttcttaaatagtcacctgttatttcccaagaacatcccaacttttccggtaggcaagtgtcaagtcacctggacaatattcctgaaaaaaagtgaaggttctacctggggttggggctcattttggaacatgaagttggcactctgaggagcctaaccttctgttaggcttcctttggggcagttggtttgcagtgatccttaataaaatagtttgcagtattttgtaggaaggatggctgtgtactcatgtgcagggaaaattaaactgctgcaagagtttggcaaaaccgccaccactttactattaatatgtctttactatttttatatgtgttttgtgggtcagcgtgttcaattttaaataggaatacactagccttacaacggaatttcttcttgtggaataaaaactgataataacctttcatcttcaagaatctgatgactgagttttgtaggaatgtacccaacagttggaccagagcctggccagttcccaccaattggagtaagctatttaattgagggttaagaagctcgatagttttttcaatctgttatcagaaaaatattatctaaagacactgatagcagctgactggtaaaactgaaagttggccttagtaaatggaactagtaaaaaatagataaaaatatgtaaaaccttttatgtcctgtcaaggaaaaaaaaataagcaaacttgatttgttttaaaattgtaaatattcattgcaaaacctaaattatacaaaatctatttcgatttgaatctcttaacatatgaaaagccacatcttaagtgcattatgctctgtaaggcatgttattagccagctttgctgaaaaatgtattcttctacagctcagaaagaggagtaaaattgctctagaaatttttgatctcagccactttgcatccaaagaggaacccaactccccactcacaatcccccacacacattttaattataagagttcaacattttccacagatatcattaagccaagcaaggaaactcctctctgtaaaaacaacaaaaaagttgcaatgtaaatagttattttagctattttctttgtgattagaggataagattttgttatttcttttggtacttagtcctttaactatctgaaaatggctcactttgacctgtttctttggtcagccaaactgaagtgaggggcctctgtttatatatagaatcttgtatatgtaactttacttatgtgggaccaatggccagtatattctaatggacacaaatctcccaatccttatgtaggattatctgttcaccttgccatgtccatcttgcaatgagacctaacttgcacctgcctgtttttctgcatgattggactccaaagactattaccaatgatgagaattgtcttgtgtcagtgtttataaaatggacttaaagcacacacacatgcatacccacattcacatgcacccttacagttctagatcaaccctggaaggcaaaaccatgtacgtccagtttctttgcaaggtctgagcagtgagaactaaattcagtcagtctaatgggtaaaatgcaacctcagtgatgcttaataaggatttgaaatcgttcaagtcatttctgtgttctttctcacaccctttcctttctattttgtcttcttttattttcaaaatgtctgtggaacaagaggatgaatcgggggagaacttctgcttcttttgactctttttaggtaatatggagtcaatatattatgatttctgtttcttatggattattaaaatcagaggaaatctgcttctctcaacataaaaccaaatccaaacccagacattgttggagtttgcctgttgacaatggttatgatgctgctcgttgtcttgagttgcatgtaacgacagtagctctgaagggtgtcatgatttcattttggcaactggtaaaagaaacttgtagtgtggtctgattgtgccagggaataaataagaaataaggaatgacctactttctcaccttgggtcaagagtgtgtgatatgaatgtgaccatgtagaaatctgtgttttcatttgacactggtttcttctaaaactgaccttcatttctgtctgtagatactagttgtatatctgcaattcagtaatttctttttaaggtataaaatcaatgaagaaaaaaaagatcatcttttgggggggcattaggtaagtagagcagggttaaatttcccagattaattatcagatttctattcattttaactattttccaagagaaaaggtaaaagcctttgtttagctacatgatatccaactttactatctcaaactccttggagaattaaaaatatatatgattttgtggctggatgaagaggtcactgcacttgcattagtttactttgcagtgtttgaacagttgaggagtggctcttctatttctgtaaataatgttttatttaaccaattaactattagaaagcctggaagataaacatacacattattttgagttatcacatttatcgttttacctagttcctgttggaatatagaaagcaacagctttttgttatctctggaacagcttctatcctagtttaaatcacagatccttactctctttaaaaaaggtcaagcataggtacctaaaaatacccacaataataagaagggaaattgcattccacaagatgattgctcttaaagagtcagaaggagttattggtgcattcctgataccataaatggttaccaaacatttggtaattttgaccaagttcacagtaaggagaaaaaagggtgttggacttgcttttcttgaagattacttatggagcaaccaacctagaaggatgaatctacttgccaataacaacactggatcacagccaaggcagaggtttttgacattcccaattcatcatggtggtgttttgtatttgtaacatgtcttttctccacagatgttgaaaggcatgcttggatgacacatgctaatagtgaaacacgctgaaagtcctgccatcacagatcactttatgttgggagccactctatgtggcaagtcatctgtcccagttccagactaaatttcaactgttcaaccatttacatcattgtagtctgtttaaggcactaaaaatgtgctgtagaaatttatatttctcagacacatgaaatgtggtgacacatccagcaacaagtcaaacactcctttgaaattttctaccttatgtcaaatatttcttacttttaaagacattcctatcctggtgtaaaatccaacataaaataatttgagggaatttaaggaattcaaatttcactccgtggggtacgtggctttatttcttaatcactgaacttctagtaatgttcttcacctgatcttgtctgcgatgtttaaccaacagtccagatcatttgcaactcaaaagcaggtacaaaatgttatccatcttaaaaacccctcacatattccctagaagactgtcccacacataattcgccttccattaacacttgtgaacccatcctggtgaaaatattgcctatgaacaattataccaaaaaatcaatttttataatgcaaataatattttacacagaccaagagaattcataatattaaagtatttcttttataaaaggaaggttttcagaaagcaatggcctattccttcatgttaatacattgcgaacttggatttggtgtaaatcaagccctgagaatattgctctgaatttctagcttaatttctgagcaacattctaaagcagttcattaatttactccaaaaacatttcttggacacttcggtgtaggagatatatattgcatggtccttaacctaaaaaattcagagttaataaatctttgtttaaaaaaa

SEQ ID NO: 46 - DNA, 5627 bp, synthetic construct
  source 1..5627: mol_type = other DNA
atgaccatgattacgccaagcttgcatgcattccagcatttatggaggactcacgtcgctttatttacagtttttctgatttttaataaagttttttgaacgtttttatggcaacttttgtgatcgccagaaatgccaaaagtaacatactatcgcaaaccgtgcttgctaaatttaataaaatataattcattaatttaaaaaaaaacagaaaaaagtcaattgagaaaaatcgcaagaaaaaacattattggtacttacacattcaatgtgcagttttttttgtgtatttattcccaaaaggttatcttaaaaaattacttgaagatactgttattcaatgaaggattgatgtctgaaatatacaaaagttctcatatgtcttctattattcgaacatttcactaaattttttataaatcaaatgccctctaggaatgtccaacaaatcaaaacctattacttttgttcccctggttagtctctcccaattaacaccaaagttcatctctctgtaaatccgcctacataaccatatcgatcgaacaatgatcatttttcatacgataatccggcagtttccatgtaccagttaatccgttagtataaaataacaggtagattcctcatttgacgatttaaatcatttcaacgcggccgcactgactgggccggccactgactgggcgcgcctctagaggatccccgggatgcaagcgatcaaatgtgtcgtcgttggtgacggagccgtcggtaaaacgtgtctcctgatatcctacaccacaaacgcatttcccggagaatatattccgacggtattcgacaactactcagcaaatgtgatggtcgacggtcggccgataaatctcgggctctgggatacagctggacaggaagattacgatcgactccgaccactgtcatatccacaaacagacgtgtttctcgtatgctttgccctgaacaatccggcgagttttgagaatgttcgtgcgaaatggtatccagaagtgtcacatcattgcccgaatacgccgattattttggttggaacgaaagctgatctgcgtgaggatcgagatactgttgaacggctccgcgaacgccggctccaaccagtgagccaaacccagggctacgtgatggcaaaggaaatcaaggctgtcaagtatctggagtgctcggcgctcacgcaacgtggtctgaaacaagttttcgatgaggcgatccgagccgtgctcacgccgccacaaagagccaaaaagagcaagtgtacggtgctctaagctagcgtcgacggtaccgctgtctcatcctactttcacctagttaactgcttgtcttaaaatctatgcttctctttagtatctaaaattttcctagaagcttacaagtatataaatggtctcttctcaataaaggttgtatatttattcatcttattgaatctgccatttcctcgtttttgcgagtttatataccttccaattttctttctattgtattttcaacttctaattttaattcagggaaactgctgtaccggtagaaaaaatgctcgagatggtgagcaagggcgaggaggataacatggccatcatcaaggagttcatgcgcttcaaggtgcacatggagggctccgtgaacggccacgagttcgagatcgagggcgagggcgagggccgcccctacgagggcacccagaccgccaagctgaaggtgaccaagggtggccccctgcccttcgcctgggacatcctgtcccctcagttcatgtacggctccaaggcctacgtgaagcaccccgccgacatccccgactacttgaagctgtccttccccgagggcttcaagtgggagcgcgtgatgaacttcgaggacggcggcgtggtgaccgtgacccaggactcctccctgcaggacggcgagttcatctacaaggtgaagctgcgcggcaccaacttcccctccgacggccccgtaatgcagaagaagaccatgggctgggaggcctcctccgagcggatgtaccccgaggacggcgccctgaagggcgagatcaagcagaggctgaagctgaaggacggcggccactacgacgctgaggtcaagaccacctacaaggccaagaagcccgtgcagctgcccggcgcctacaacgtcaacatcaagttggacatcacctcccacaacgaggactacaccatcgtggaacagtacgaacgcgccgagggccgccactccaccggcggcatggacgagctgtacaagtaagaattccaactgagcgccggtcgctaccattaccaacttgtctggtgtcaaaaataataggggccgctgtcatcagagtaagtttaaactgagttctactaactaacgagtaatatttaaattttcagcatctcgcgcccgtgcctctgacttctaagtccaattactcttcaacatccctacatgctctttctccctgtgctcccaccccctatttttgttattatcaaaaaaacttcttcttaatttctttgttttttagcttcttttaagtcacctctaacaatgaaattgtgtagattcaaaaatagaattaattcgtaataaaaagtcgaaaaaaattgtgctccctccccccattaataataattctatcccaaaatctacacaatgttctgtgtacacttcttatgttttttttacttctgataaattttttttgaaacatcatagaaaaaaccgcacacaaaataccttatcatatgttacgtttcagtttatgaccgcaatttttatttcttcgcacgtctgggcctctcatgacgtcaaatcatgctcatcgtgaaaaagttttggagtatttttggaatttttcaatcaagtgaaagtttatgaaattaattttcctgcttttgctttttgggggtttcccctattgtttgtcaagagtttcgaggacggcgtttttcttgctaaaatcacaagtattgatgagcacgatgcaagaaagatcggaagaaggtttgggtttgaggctcagtggaaggtgagtagaagttgataatttgaaagtggagtagtgtctatggggtttttgccttaaatgacagaatacattcccaatataccaaacataactgtttcctactagtcggccgtacgggccctttcgtctcgcgcgtttcggtgatgacggtgaaaacctctgacacatgcagctcccggagacggtcacagcttgtctgtaagcggatgccgggagcagacaagcccgtcagggcgcgtcagcgggtgttggcgggtgtcggggctggcttaactatgcggcatcagagcagattgtactgagagtgcaccatatgcggtgtgaaataccgcacagatgcgtaaggagaaaataccgcatcaggcggccttaattaagggcctcgtgatacgcctatttttataggttaatgtcatgataataatggtttcttagacgtcaggtggcacttttcggggaaatgtgcgcggaacccctatttgtttatttttctaaatacattcaaatatgtatccgctcatgagacaataaccctgataaatgcttcaataatattgaaaaaggaagagtatgagtattcaacatttccgtgtcgcccttattcccttttttgcggcattttgccttcctgtttttgctcacccagaaacgctggtgaaagtaaaagatgctgaagatcagttgggtgcacgagtgggttacatcgaactggatctcaacagcggtaagatccttgagagttttcgccccgaagaacgttttccaatgatgagcacttttaaagttctgctatgtggcgcggtattatcccgtattgacgccgggcaagagcaactcggtcgccgcatacactattctcagaatgacttggttgagtactcaccagtcacagaaaagcatcttacggatggcatgacagtaagagaattatgcagtgctgccataaccatgagtgataacactgcggccaacttacttctgacaacgatcggaggaccgaaggagctaaccgcttttttgcacaacatgggggatcatgtaactcgccttgatcgttgggaaccggagctgaatgaagccataccaaacgacgagcgtgacaccacgatgcctgtagcaatggcaacaacgttgcgcaaactattaactggcgaactacttactctagcttcccggcaacaattaatagactggatggaggcggataaagttgcaggaccacttctgcgctcggcccttccggctggctggtttattgctgataaatctggagccggtgagcgtgggtctcgcggtatcattgcagcactggggccagatggtaagccctcccgtatcgtagttatctacacgacggggagtcaggcaactatggatgaacgaaatagacagatcgctgagataggtgcctcactgattaagcattggtaactgtcagaccaagtttactcatatatactttagattgatttaaaacttcatttttaatttaaaaggatctaggtgaagatcctttttgataatctcatgaccaaaatcccttaacgtgagttttcgttccactgagcgtcagaccccgtagaaaagatcaaaggatcttcttgagatcctttttttctgcgcgtaatctgctgcttgcaaacaaaaaaaccaccgctaccagcggtggtttgtttgccggatcaagagctaccaactctttttccgaaggtaactggcttcagcagagcgcagataccaaatactgtccttctagtgtagccgtagttaggccaccacttcaagaactctgtagcaccgcctacatacctcgctctgctaatcctgttaccagtggctgctgccagtggcgataagtcgtgtcttaccgggttggactcaagacgatagttaccggataaggcgcagcggtcgggctgaacggggggttcgtgcacacagcccagcttggagcgaacgacctacaccgaactgagatacctacagcgtgagcattgagaaagcgccacgcttcccgaagggagaaaggcggacaggtatccggtaagcggcagggtcggaacaggagagcgcacgagggagcttccagggggaaacgcctggtatctttatagtcctgtcgggtttcgccacctctgacttgagcgtcgatttttgtgatgctcgtcaggggggcggagcctatggaaaaacgccagcaacgcggcctttttacggttcctggccttttgctggccttttgctcacatgttctttcctgcgttatcccctgattctgtggataaccgtattaccgcctttgagtgagctgataccgctcgccgcagccgaacgaccgagcgcagcgagtcagtgagcgaggaagcggaagagcgcccaatacgcaaaccgcctctccccgcgcgttggccgattcattaatgcagctggcacgacaggtttcccgactggaaagcgggcagtgagcgcaacgcaattaatgtgagttagctcactcattaggcaccccaggctttacactttatgcttccggctcgtatgttgtgtggaattgtgagcggataacaatttcacacaggaaacagct

SEQ ID NO: 47 - DNA, 5093 bp, synthetic construct
  source 1..5093: mol_type = other DNA
atgaccatgattacgccaagcttgcatgcattccagcatttatggaggactcacgtcgctttatttacagtttttctgatttttaataaagttttttgaacgtttttatggcaacttttgtgatcgccagaaatgccaaaagtaacatactatcgcaaaccgtgcttgctaaatttaataaaatataattcattaatttaaaaaaaaacagaaaaaagtcaattgagaaaaatcgcaagaaaaaacattattggtacttacacattcaatgtgcagttttttttgtgtatttattcccaaaaggttatcttaaaaaattacttgaagatactgttattcaatgaaggattgatgtctgaaatatacaaaagttctcatatgtcttctattattcgaacatttcactaaattttttataaatcaaatgccctctaggaatgtccaacaaatcaaaacctattacttttgttcccctggttagtctctcccaattaacaccaaagttcatctctctgtaaatccgcctacataaccatatcgatcgaacaatgatcatttttcatacgataatccggcagtttccatgtaccagttaatccgttagtataaaataacaggtagattcctcatttgacgatttaaatcatttcaacgcggccgcactgactgggccggccactgactgggcgcgcctctagaggatccccgggattggccaaaggacccaaaggtatgtttcgaatgatactaacataacatagaacattttcaggaggacccttggctagcgtcgacggtaccggtagaaaaaatgagtaaaggagaagaacttttcactggagttgtcccaattcttgttgaattagatggtgatgttaatgggcacaaattttctgtcagtggagagggtgaaggtgatgcaacatacggaaaacttacccttaaatttatttgcactactggaaaactacctgttccatgggtaagtttaaacatatatatactaactaaccctgattatttaaattttcagccaacacttgtcactactttctgttatggtgttcaatgcttctcgagatacccagatcatatgaaacggcatgactttttcaagagtgccatgcccgaaggttatgtacaggaaagaactatatttttcaaagatgacgggaactacaagacacgtaagtttaaacagttcggtactaactaaccatacatatttaaattttcaggtgctgaagtcaagtttgaaggtgatacccttgttaatagaatcgagttaaaaggtattgattttaaagaagatggaaacattcttggacacaaattggaatacaactataactcacacaatgtatacatcatggcagacaaacaaaagaatggaatcaaagttgtaagtttaaacttggacttactaactaacggattatatttaaattttcagaacttcaaaattagacacaacattgaagatggaagcgttcaactagcagaccattatcaacaaaatactccaattggcgatggccctgtccttttaccagacaaccattacctgtccacacaatctgccctttcgaaagatcccaacgaaaagagagaccacatggtccttcttgagtttgtaacagctgctgggattacacatggcatggatgaactatacaaatagcattcgtagaattccaactgagcgccggtcgctaccattaccaacttgtctggtgtcaaaaataataggggccgctgtcatcagagtaagtttaaactgagttctactaactaacgagtaatatttaaattttcagcatctcgcgcccgtgcctctgacttctaagtccaattactcttcaacatccctacatgctctttctccctgtgctcccaccccctatttttgttattatcaaaaaaacttcttcttaatttctttgttttttagcttcttttaagtcacctctaacaatgaaattgtgtagattcaaaaatagaattaattcgtaataaaaagtcgaaaaaaattgtgctccctccccccattaataataattctatcccaaaatctacacaatgttctgtgtacacttcttatgttttttttacttctgataaattttttttgaaacatcatagaaaaaaccgcacacaaaataccttatcatatgttacgtttcagtttatgaccgcaatttttatttcttcgcacgtctgggcctctcatgacgtcaaatcatgctcatcgtgaaaaagttttggagtatttttggaatttttcaatcaagtgaaagtttatgaaattaattttcctgcttttgctttttgggggtttcccctattgtttgtcaagagtttcgaggacggcgtttttcttgctaaaatcacaagtattgatgagcacgatgcaagaaagatcggaagaaggtttgggtttgaggctcagtggaaggtgagtagaagttgataatttgaaagtggagtagtgtctatggggtttttgccttaaatgacagaatacattcccaatataccaaacataactgtttcctactagtcggccgtacgggccctttcgtctcgcgcgtttcggtgatgacggtgaaaacctctgacacatgcagctcccggagacggtcacagcttgtctgtaagcggatgccgggagcagacaagcccgtcagggcgcgtcagcgggtgttggcgggtgtcggggctggcttaactatgcggcatcagagcagattgtactgagagtgcaccatatgcggtgtgaaataccgcacagatgcgtaaggagaaaataccgcatcaggcggccttaattaagggcctcgtgatacgcctatttttataggttaatgtcatgataataatggtttcttagacgtcaggtggcacttttcggggaaatgtgcgcggaacccctatttgtttatttttctaaatacattcaaatatgtatccgctcatgagacaataaccctgataaatgcttcaataatattgaaaaaggaagagtatgagtattcaacatttccgtgtcgcccttattcccttttttgcggcattttgccttcctgtttttgctcacccagaaacgctggtgaaagtaaaagatgctgaagatcagttgggtgcacgagtgggttacatcgaactggatctcaacagcggtaagatccttgagagttttcgccccgaagaacgttttccaatgatgagcacttttaaagttctgctatgtggcgcggtattatcccgtattgacgccgggcaagagcaactcggtcgccgcatacactattctcagaatgacttggttgagtactcaccagtcacagaaaagcatcttacggatggcatgacagtaagagaattatgcagtgctgccataaccatgagtgataacactgcggccaacttacttctgacaacgatcggaggaccgaaggagctaaccgcttttttgcacaacatgggggatcatgtaactcgccttgatcgttgggaaccggagctgaatgaagccataccaaacgacgagcgtgacaccacgatgcctgtagcaatggcaacaacgttgcgcaaactattaactggcgaactacttactctagcttcccggcaacaattaatagactggatggaggcggataaagttgcaggaccacttctgcgctcggcccttccggctggctggtttattgctgataaatctggagccggtgagcgtgggtctcgcggtatcattgcagcactggggccagatggtaagccctcccgtatcgtagttatctacacgacggggagtcaggcaactatggatgaacgaaatagacagatcgctgagataggtgcctcactgattaagcattggtaactgtcagaccaagtttactcatatatactttagattgatttaaaacttcatttttaatttaaaaggatctaggtgaagatcctttttgataatctcatgaccaaaatcccttaacgtgagttttcgttccactgagcgtcagaccccgtagaaaagatcaaaggatcttcttgagatcctttttttctgcgcgtaatctgctgcttgcaaacaaaaaaaccaccgctaccagcggtggtttgtttgccggatcaagagctaccaactctttttccgaaggtaactggcttcagcagagcgcagataccaaatactgtccttctagtgtagccgtagttaggccaccacttcaagaactctgtagcaccgcctacatacctcgctctgctaatcctgttaccagtggctgctgccagtggcgataagtcgtgtcttaccgggttggactcaagacgatagttaccggataaggcgcagcggtcgggctgaacggggggttcgtgcacacagcccagcttggagcgaacgacctacaccgaactgagatacctacagcgtgagcattgagaaagcgccacgcttcccgaagggagaaaggcggacaggtatccggtaagcggcagggtcggaacaggagagcgcacgagggagcttccagggggaaacgcctggtatctttatagtcctgtcgggtttcgccacctctgacttgagcgtcgatttttgtgatgctcgtcaggggggcggagcctatggaaaaacgccagcaacgcggcctttttacggttcctggccttttgctggccttttgctcacatgttctttcctgcgttatcccctgattctgtggataaccgtattaccgcctttgagtgagctgataccgctcgccgcagccgaacgaccgagcgcagcgagtcagtgagcgaggaagcggaagagcgcccaatacgcaaaccgcctctccccgcgcgttggccgattcattaatgcagctggcacgacaggtttcccgactggaaagcgggcagtgagcgcaacgcaattaatgtgagttagctcactcattaggcaccccaggctttacactttatgcttccggctcgtatgttgtgtggaattgtgagcggataacaatttcacacaggaaacagctgggggtggggggggggttgggggtggggtgttgttggggtgtgttttgtgt

SEQ ID NO: 48 - DNA, 7185 bp, synthetic construct
  source 1..7185: mol_type = other DNA
atgaccatgattacgccaagcttgcatgcattccagcatttatggaggactcacgtcgctttatttacagtttttctgatttttaataaagttttttgaacgtttttatggcaacttttgtgatcgccagaaatgccaaaagtaacatactatcgcaaaccgtgcttgctaaatttaataaaatataattcattaatttaaaaaaaaacagaaaaaagtcaattgagaaaaatcgcaagaaaaaacattattggtacttacacattcaatgtgcagttttttttgtgtatttattcccaaaaggttatcttaaaaaattacttgaagatactgttattcaatgaaggattgatgtctgaaatatacaaaagttctcatatgtcttctattattcgaacatttcactaaattttttataaatcaaatgccctctaggaatgtccaacaaatcaaaacctattacttttgttcccctggttagtctctcccaattaacaccaaagttcatctctctgtaaatccgcctacataaccatatcgatcgaacaatgatcatttttcatacgataatccggcagtttccatgtaccagttaatccgttagtataaaataacaggtagattcctcatttgacgatttaaatcatttcaacgcggccgcactgactgggccggccactgactgggcgcgcctctagaatgtctatgaaacgattcggaaaagcagcatatcgaatcgcaaatgagttagttgcaaaaggtggacgactaccaattttccaacgcttcctgccgagaatatttcccgccacttataatttaggagttcatgtcgtactcaaaaaggctccatttccacgacaaaatgctctacgaattgctcgccttgtaactcgccacggtcgagttttccggccattttcctcagtaataatcgaaagacatcgatttcaaaatcaaaatgattggcgtcgaaagtttcaaccgattcgtaaagaattgccaagaaatgtggatttagtcgaacgaatcaggcagatatttggcaattctctacgatacaatgaggatttgaaaagcactgaatggccgaatagaattgattcttatgagtttggggaatttcttggtcaaggatgcaatgcagcagtttactctgcgagattagccaattctgatgcagaatcctcagggaatactcactatggtgcagggtttaatgaagtcacaaatatacttgcagaaattccgccagttagcaaagttgcacaaaagaaattcccgttggcaatcaaattaatgtttaattttgaacatgatcgcgatggagatgctcatctcttgaaatcaatgggaaatgaattggctccatatccgaatgctgcaaagttgctcaatggacaaatgggaacatttagacctcttccagcaaaacatccaaatgttgttcgaattcagacagcttttattgattcgttaaaagttttgccagatgcgattgaacgatatccagatgcccttcacactgcacgttggtatgagtcaattgcctccgaaccgaaaacaatgtacgtagtaatgagacgataccgacaaacacttcatgaatatgtatggactcgtcatcgaaattattggacaggacgagtgataattgctcaactattagaagcatgtacatatcttcataagcataaagttgctcagcgagacatgaaaagtgataatattcttctggaatatgattttgacgacgagattccccaattagttgtcgccgattttggatgtgcacttgcatgtgacaattggcaagtagactatgaatcagatgaagttagtcttggaggaaatgccaagacaaaagcaccagaaattgcgacggctgttcctggaaagaatgtaaaagtaaacttcgaaatggcagatacatgggcagctggaggcctttcttatgaagttctaacacgatcaaatccattctacaaacttcttgatactgcaacataccaggaatcagaactaccagcactcccatctcgtgtcaattttgtggcacgagatgtcatttttgacctactcaagcgagatcctaatgaaagagtcaagccgaatattgctgcaaatgcgttgaatttgtcattgttcagaatgggagaagatgtgaagcagatgatggaaaaatgtggaatatctcaaatgactactctattggctggaagttctaaagttttgagtcaaaaaatcaatagtcgtctggacaaagtgatgaatctgattactgctgaaactatcatggccaacctagctccacatttgattagtcgagcagaacgacaacttcgagcaacatttctttcaagaatgaatcgagaagatatttggagaagtcttcaatatttcttcccagctggtgttcaacttgacacacctgccacatcatcagactgtttggagactatttccagtttgatgtcgagtttttcaaatgattcagaaaattacgagaagcaacagaaaccggctaaaaatggatacaacaatgttccacttcttctcagaaatgttatccgtacagatgcggatggaatcaatggaattgtacatagagttcgatctaaatagcccgggattggccaaaggacccaaaggtatgtttcgaatgatactaacataacatagaacattttcaggaggacccttggctagcgtcgacggtaccgctgtctcatcctactttcacctagttaactgcttgtcttaaaatctatgcttctctttagtatctaaaattttcctagaagcttacaagtatataaatggtctcttctcaataaaggttgtatatttattcatcttattgaatctgccatttcctcgtttttgcgagtttatataccttccaattttctttctattgtattttcaacttctaattttaattcagggaaactgctgtaccggtagaaaaaatggtctccgagctcattaacgaaaacatgcatatgaagctctacatggagggaaccgtcaacaaccaccacttcaagtgcacctccgagggagagggaaagccatacgagggaacccaaaccatgcgtatcaaggccgtcgagggaggaccactcccattcgccttcgacatcctcgccacctccttcatgtacggatccaaggtaagtttaaacatatatatactaactaaccctgattatttaaattttcagaccttcatcaaccacacccaaggaatcccagacttcttcaagcaatccttcccagagggattcacctgggagcgtgtcaccacctacgaggacggaggagtcctcaccgccacccaagacacctccctccaagacggatgcctcatctacaacgtcaaggtaagtttaaacagttcggtactaactaaccatacatatttaaattttcagatccgtggagtcaacttcccatccaacggaccagtcatgcaaaagaagaccctcggatgggaggcctccaccgagaccctctacccagccgacggaggacttgagggacgtgccgacatggccctcaagctcgtcggaggaggacacctcatctgcaacctcaaggtaagtttaaacatgattttactaactaactaatctgatttaaattttcagaccacctaccgttccaagaagccagccaagaacctcaagatgccaggagtctactacgtcgaccgtcgtcttgagcgtatcaaggaggccgacaaggagacctacgtcgagcaacacgaggtcgccgtcgcccgttactgcgacctcccatccaagctcggacaccgttagcattcgtagaattccaactgagcgccggtcgctaccattaccaacttgtctggtgtcaaaaataataggggccgctgtcatcagagtaagtttaaactgagttctactaactaacgagtaatatttaaattttcagcatctcgcgcccgtgcctctgacttctaagtccaattactcttcaacatccctacatgctctttctccctgtgctcccaccccctatttttgttattatcaaaaaaacttcttcttaatttctttgttttttagcttcttttaagtcacctctaacaatgaaattgtgtagattcaaaaatagaattaattcgtaataaaaagtcgaaaaaaattgtgctccctccccccattaataataattctatcccaaaatctacacaatgttctgtgtacacttcttatgttttttttacttctgataaattttttttgaaacatcatagaaaaaaccgcacacaaaataccttatcatatgttacgtttcagtttatgaccgcaatttttatttcttcgcacgtctgggcctctcatgacgtcaaatcatgctcatcgtgaaaaagttttggagtatttttggaatttttcaatcaagtgaaagtttatgaaattaattttcctgcttttgctttttgggggtttcccctattgtttgtcaagagtttcgaggacggcgtttttcttgctaaaatcacaagtattgatgagcacgatgcaagaaagatcggaagaaggtttgggtttgaggctcagtggaaggtgagtagaagttgataatttgaaagtggagtagtgtctatggggtttttgccttaaatgacagaatacattcccaatataccaaacataactgtttcctactagtcggccgtacgggccctttcgtctcgcgcgtttcggtgatgacggtgaaaacctctgacacatgcagctcccggagacggtcacagcttgtctgtaagcggatgccgggagcagacaagcccgtcagggcgcgtcagcgggtgttggcgggtgtcggggctggcttaactatgcggcatcagagcagattgtactgagagtgcaccatatgcggtgtgaaataccgcacagatgcgtaaggagaaaataccgcatcaggcggccttaattaagggcctcgtgatacgcctatttttataggttaatgtcatgataataatggtttcttagacgtcaggtggcacttttcggggaaatgtgcgcggaacccctatttgtttatttttctaaatacattcaaatatgtatccgctcatgagacaataaccctgataaatgcttcaataatattgaaaaaggaagagtatgagtattcaacatttccgtgtcgcccttattcccttttttgcggcattttgccttcctgtttttgctcacccagaaacgctggtgaaagtaaaagatgctgaagatcagttgggtgcacgagtgggttacatcgaactggatctcaacagcggtaagatccttgagagttttcgccccgaagaacgttttccaatgatgagcacttttaaagttctgctatgtggcgcggtattatcccgtattgacgccgggcaagagcaactcggtcgccgcatacactattctcagaatgacttggttgagtactcaccagtcacagaaaagcatcttacggatggcatgacagtaagagaattatgcagtgctgccataaccatgagtgataacactgcggccaacttacttctgacaacgatcggaggaccgaaggagctaaccgcttttttgcacaacatgggggatcatgtaactcgccttgatcgttgggaaccggagctgaatgaagccataccaaacgacgagcgtgacaccacgatgcctgtagcaatggcaacaacgttgcgcaaactattaactggcgaactacttactctagcttcccggcaacaattaatagactggatggaggcggataaagttgcaggaccacttctgcgctcggcccttccggctggctggtttattgctgataaatctggagccggtgagcgtgggtctcgcggtatcattgcagcactggggccagatggtaagccctcccgtatcgtagttatctacacgacggggagtcaggcaactatggatgaacgaaatagacagatcgctgagataggtgcctcactgattaagcattggtaactgtcagaccaagtttactcatatatactttagattgatttaaaacttcatttttaatttaaaaggatctaggtgaagatcctttttgataatctcatgaccaaaatcccttaacgtgagttttcgttccactgagcgtcagaccccgtagaaaagatcaaaggatcttcttgagatcctttttttctgcgcgtaatctgctgcttgcaaacaaaaaaaccaccgctaccagcggtggtttgtttgccggatcaagagctaccaactctttttccgaaggtaactggcttcagcagagcgcagataccaaatactgtccttctagtgtagccgtagttaggccaccacttcaagaactctgtagcaccgcctacatacctcgctctgctaatcctgttaccagtggctgctgccagtggcgataagtcgtgtcttaccgggttggactcaagacgatagttaccggataaggcgcagcggtcgggctgaacggggggttcgtgcacacagcccagcttggagcgaacgacctacaccgaactgagatacctacagcgtgagcattgagaaagcgccacgcttcccgaagggagaaaggcggacaggtatccggtaagcggcagggtcggaacaggagagcgcacgagggagcttccagggggaaacgcctggtatctttatagtcctgtcgggtttcgccacctctgacttgagcgtcgatttttgtgatgctcgtcaggggggcggagcctatggaaaaacgccagcaacgcggcctttttacggttcctggccttttgctggccttttgctcacatgttctttcctgcgttatcccctgattctgtggataaccgtattaccgcctttgagtgagctgataccgctcgccgcagccgaacgaccgagcgcagcgagtcagtgagcgaggaagcggaagagcgcccaatacgcaaaccgcctctccccgcgcgttggccgattcattaatgcagctggcacgacaggtttcccgactggaaagcgggcagtgagcgcaacgcaattaatgtgagttagctcactcattaggcaccccaggctttacactttatgcttccggctcgtatgttgtgtggaattgtgagcggataacaatttcacacaggaaacagct

SEQ ID NO: 49 - DNA, 6405 bp, synthetic construct
  source 1..6405: mol_type = other DNA
atgaccatgattacgccaagcttgcatgcattccagcatttatggaggactcacgtcgctttatttacagtttttctgatttttaataaagttttttgaacgtttttatggcaacttttgtgatcgccagaaatgccaaaagtaacatactatcgcaaaccgtgcttgctaaatttaataaaatataattcattaatttaaaaaaaaacagaaaaaagtcaattgagaaaaatcgcaagaaaaaacattattggtacttacacattcaatgtgcagttttttttgtgtatttattcccaaaaggttatcttaaaaaattacttgaagatactgttattcaatgaaggattgatgtctgaaatatacaaaagttctcatatgtcttctattattcgaacatttcactaaattttttataaatcaaatgccctctaggaatgtccaacaaatcaaaacctattacttttgttcccctggttagtctctcccaattaacaccaaagttcatctctctgtaaatccgcctacataaccatatcgatcgaacaatgatcatttttcatacgataatccggcagtttccatgtaccagttaatccgttagtataaaataacaggtagattcctcatttgacgatttaaatcatttcaacgcggccgcactgactgggatgattgtttttgttcgtttcaattcttctcacggtttcccagtcgaggtcgactccgacacctccatcttccaactcaaggaggtcgtcgccaagcgtcaaggagtcccagccgaccaactccgtgtcatcttcgccggaaaggagctccgtaacgactggaccgtccaaaactgcgacctcgaccaacaatccatcgtccacatcgtccaacgtccatggcgtaagggacaagagatgaacgccaccggaggagacgacccacgtaacgccgccggaggatgcgagcgtgagccacaatccctcacccgtgtcgacctctcctcctccgtcctcccaggagactccgtcggactcgccgtcatcctccacaccgactcccgtaaggactccccaccagccggatccccagccggacgttccatctacaactccttctacgtctactgcaagggaccatgccaacgtgtccaaccaggaaagctccgtgtccaatgctccacctgccgtcaagccaccctcaccctcacccaaggaccatcctgctgggacgacgtcctcatcccaaaccgtatgtccggagagtgccaatccccacactgcccaggaacctccgccgagttcttcttcaagtgcggagcccacccaacctccgacaaggagacctccgtcgccctccacctcatcgccaccaactcccgtaacatcacctgcatcacctgcaccgacgtccgttccccagtcctcgtcttccaatgcaactcccgtcacgtcatctgcctcgactgcttccacctctactgcgtcacccgtctcaacgaccgtcaattcgtccacgacccacaactcggatactccctcccatgcgtcgccggatgcccaaactccctcatcaaggagctccaccacttccgtatcctcggagaggagcaatacaaccgttaccaacaatacggagccgaggagtgcgtcctccaaatgggaggagtcctctgcccacgtccaggatgcggagccggactcctcccagagccagaccaacgtaaggtcacctgcgagggaggaaacggactcggatgcggattcgccttctgccgtgagtgcaaggaggcctaccacgagggagagtgctccgccgtcttcgaggcctccggaaccaccacccaagcctaccgtgtcgacgagcgtgccgccgagcaagcccgttgggaggccgcctccaaggagaccatcaagaagaccaccaagccatgcccacgttgccacgtcccagtcgagaagaacggaggatgcatgcacatgaagtgcccacaaccacaatgccgtctcgagtggtgctggaactgcggatgcgagtggaaccgtgtctgcatgggagaccactggttcgacgtctaacgtcgacggtaccgctgtctcatcctactttcacctagttaactgcttgtcttaaaatctatgcttctctttagtatctaaaattttcctagaagcttacaagtatataaatggtctcttctcaataaaggttgtatatttattcatcttattgaatctgccatttcctcgtttttgcgagtttatataccttccaattttctttctattgtattttcaacttctaattttaattcagggaaactgctgtaccggtagaaaaaatgctcgagatggtgagcaagggcgaggaggataacatggccatcatcaaggagttcatgcgcttcaaggtgcacatggagggctccgtgaacggccacgagttcgagatcgagggcgagggcgagggccgcccctacgagggcacccagaccgccaagctgaaggtgaccaagggtggccccctgcccttcgcctgggacatcctgtcccctcagttcatgtacggctccaaggcctacgtgaagcaccccgccgacatccccgactacttgaagctgtccttccccgagggcttcaagtgggagcgcgtgatgaacttcgaggacggcggcgtggtgaccgtgacccaggactcctccctgcaggacggcgagttcatctacaaggtgaagctgcgcggcaccaacttcccctccgacggccccgtaatgcagaagaagaccatgggctgggaggcctcctccgagcggatgtaccccgaggacggcgccctgaagggcgagatcaagcagaggctgaagctgaaggacggcggccactacgacgctgaggtcaagaccacctacaaggccaagaagcccgtgcagctgcccggcgcctacaacgtcaacatcaagttggacatcacctcccacaacgaggactacaccatcgtggaacagtacgaacgcgccgagggccgccactccaccggcggcatggacgagctgtacaagtaagaattccaactgagcgccggtcgctaccattaccaacttgtctggtgtcaaaaataataggggccgctgtcatcagagtaagtttaaactgagttctactaactaacgagtaatatttaaattttcagcatctcgcgcccgtgcctctgacttctaagtccaattactcttcaacatccctacatgctctttctccctgtgctcccaccccctatttttgttattatcaaaaaaacttcttcttaatttctttgttttttagcttcttttaagtcacctctaacaatgaaattgtgtagattcaaaaatagaattaattcgtaataaaaagtcgaaaaaaattgtgctccctccccccattaataataattctatcccaaaatctacacaatgttctgtgtacacttcttatgttttttttacttctgataaattttttttgaaacatcatagaaaaaaccgcacacaaaataccttatcatatgttacgtttcagtttatgaccgcaatttttatttcttcgcacgtctgggcctctcatgacgtcaaatcatgctcatcgtgaaaaagttttggagtatttttggaatttttcaatcaagtgaaagtttatgaaattaattttcctgcttttgctttttgggggtttcccctattgtttgtcaagagtttcgaggacggcgtttttcttgctaaaatcacaagtattgatgagcacgatgcaagaaagatcggaagaaggtttgggtttgaggctcagtggaaggtgagtagaagttgataatttgaaagtggagtagtgtctatggggtttttgccttaaatgacagaatacattcccaatataccaaacataactgtttcctactagtcggccgtacgggccctttcgtctcgcgcgtttcggtgatgacggtgaaaacctctgacacatgcagctcccggagacggtcacagcttgtctgtaagcggatgccgggagcagacaagcccgtcagggcgcgtcagcgggtgttggcgggtgtcggggctggcttaactatgcggcatcagagcagattgtactgagagtgcaccatatgcggtgtgaaataccgcacagatgcgtaaggagaaaataccgcatcaggcggccttaattaagggcctcgtgatacgcctatttttataggttaatgtcatgataataatggtttcttagacgtcaggtggcacttttcggggaaatgtgcgcggaacccctatttgtttatttttctaaatacattcaaatatgtatccgctcatgagacaataaccctgataaatgcttcaataatattgaaaaaggaagagtatgagtattcaacatttccgtgtcgcccttattcccttttttgcggcattttgccttcctgtttttgctcacccagaaacgctggtgaaagtaaaagatgctgaagatcagttgggtgcacgagtgggttacatcgaactggatctcaacagcggtaagatccttgagagttttcgccccgaagaacgttttccaatgatgagcacttttaaagttctgctatgtggcgcggtattatcccgtattgacgccgggcaagagcaactcggtcgccgcatacactattctcagaatgacttggttgagtactcaccagtcacagaaaagcatcttacggatggcatgacagtaagagaattatgcagtgctgccataaccatgagtgataacactgcggccaacttacttctgacaacgatcggaggaccgaaggagctaaccgcttttttgcacaacatgggggatcatgtaactcgccttgatcgttgggaaccggagctgaatgaagccataccaaacgacgagcgtgacaccacgatgcctgtagcaatggcaacaacgttgcgcaaactattaactggcgaactacttactctagcttcccggcaacaattaatagactggatggaggcggataaagttgcaggaccacttctgcgctcggcccttccggctggctggtttattgctgataaatctggagccggtgagcgtgggtctcgcggtatcattgcagcactggggccagatggtaagccctcccgtatcgtagttatctacacgacggggagtcaggcaactatggatgaacgaaatagacagatcgctgagataggtgcctcactgattaagcattggtaactgtcagaccaagtttactcatatatactttagattgatttaaaacttcatttttaatttaaaaggatctaggtgaagatcctttttgataatctcatgaccaaaatcccttaacgtgagttttcgttccactgagcgtcagaccccgtagaaaagatcaaaggatcttcttgagatcctttttttctgcgcgtaatctgctgcttgcaaacaaaaaaaccaccgctaccagcggtggtttgtttgccggatcaagagctaccaactctttttccgaaggtaactggcttcagcagagcgcagataccaaatactgtccttctagtgtagccgtagttaggccaccacttcaagaactctgtagcaccgcctacatacctcgctctgctaatcctgttaccagtggctgctgccagtggcgataagtcgtgtcttaccgggttggactcaagacgatagttaccggataaggcgcagcggtcgggctgaacggggggttcgtgcacacagcccagcttggagcgaacgacctacaccgaactgagatacctacagcgtgagcattgagaaagcgccacgcttcccgaagggagaaaggcggacaggtatccggtaagcggcagggtcggaacaggagagcgcacgagggagcttccagggggaaacgcctggtatctttatagtcctgtcgggtttcgccacctctgacttgagcgtcgatttttgtgatgctcgtcaggggggcggagcctatggaaaaacgccagcaacgcggcctttttacggttcctggccttttgctggccttttgctcacatgttctttcctgcgttatcccctgattctgtggataaccgtattaccgcctttgagtgagctgataccgctcgccgcagccgaacgaccgagcgcagcgagtcagtgagcgaggaagcggaagagcgcccaatacgcaaaccgcctctccccgcgcgttggccgattcattaatgcagctggcacgacaggtttcccgactggaaagcgggcagtgagcgcaacgcaattaatgtgagttagctcactcattaggcaccccaggctttacactttatgcttccggctcgtatgttgtgtggaattgtgagcggataacaatttcacacaggaaacagct

SEQ ID NO: 50 - DNA, 7268 bp, synthetic construct
  source 1..7268: mol_type = other DNA
atgaccatgattacgccaagcttgcatgcattccagcatttatggaggactcacgtcgctttatttacagtttttctgatttttaataaagttttttgaacgtttttatggcaacttttgtgatcgccagaaatgccaaaagtaacatactatcgcaaaccgtgcttgctaaatttaataaaatataattcattaatttaaaaaaaaacagaaaaaagtcaattgagaaaaatcgcaagaaaaaacattattggtacttacacattcaatgtgcagttttttttgtgtatttattcccaaaaggttatcttaaaaaattacttgaagatactgttattcaatgaaggattgatgtctgaaatatacaaaagttctcatatgtcttctattattcgaacatttcactaaattttttataaatcaaatgccctctaggaatgtccaacaaatcaaaacctattacttttgttcccctggttagtctctcccaattaacaccaaagttcatctctctgtaaatccgcctacataaccatatcgatcgaacaatgatcatttttcatacgataatccggcagtttccatgtaccagttaatccgttagtataaaataacaggtagattcctcatttgacgatttaaatcatttcaacgcggccgcactgactgggccggccactgactgggcgcgcctctagaggatccccgggatgccatcttcctatactcagatggcgttccatatgccattaaaggagttacaaccagttgacacatcacttccggagcacgttgtcaagggtgccgtagtgattgacaaagaatttacaatatggaatcatcgagctgtaattccatcaaatgctcttcacacagtattcataacaatcaatttattggaacaaaaactgacggatgtcgtgaaaatggcagctcgatcaatgaatttatcagaagatgattcgtatggattgatggctgataaaccgaaaagattcataactgatgataatttgaattcattaggaagtggtttcatattaacactttgtgcatcaccggatcattatgttaaacggattactgaaatattgacagaaggaaataatatttcacaaatggaaaatgctgtgaaaactctcgatgagttttctctggatcccgctctaattgaagccttttatcgatgctcatctcttgaactcttgttcagtttaattcgtgatgatcgagtttgtatgagctcaacacttctttcaacatgtcttcgtgcactttcaagtatgctggaattagctgtaggagattttacatggaaatcagtaccaaatgatgtagttgtgtctatggcatcattggtaactggaaaagcgaaacgagaagaagcgaacacgttgttagctgctcttcagatgctcgaacagcttgttatcggtgacgatacaactcgtgattggattctcgaagaagttccaatagagactctcattcgacacgttgaaaaatcagatgaacgaattgctctttgtgcactttcactaatgaattcaatgataagaagatgtcctgatgatgaaaaacgatttgaacttattaaatctttagaagtcgttccattccgtaatgctgtacacagttctcttctacgtggtggtggtggtgttcgaaatctgaatgctattgaacaacttgttgaggttcaaaggagtctgattagtgcatatgaaacttcacctcctactgatgctgaagttcagaaaattcttgatattgaatccagtgaggatgtttccgaggagatcagagaaatgtggaaatcacaaattggggaacaccgatgtggacggttggctgcaatttcgatggttcaatttgcagaaaaaagtccgcaagatctgagaatgctaatttcggagaatacaatgaggattgaaggaggaaaatggcaactgattccaatgtggatgaggtgctgtgacattgccgcagaattgttcagagtaatacctggtcgtgatgagttggatcgtttgattgtagttctcttttccacggagactccatttccagctgtattcgcatgtattgtacaccttttccatcgaacatggcgtgagatgcaggcaaaaggaggtgaaatggagaaagttgcgtgtgttgtactggaacagttacggcatgtgctgaaaagacgggaaatacaagatgtagaagaactatctgcggatttggagactttttcgtatagggcaatgcaagaaatttggagagaggaacaattgggaaaggaaaatattcaattacatagtgaagctgtgatacaactaaaatcgaaattgcggccaaaaatggaggaattggttcgaataaatcatctaaactatttgaagttaggcgccgtttttcgaaaaccacagaaaagtaaatccctcgcaaagctcgccttctggcattggaagctcgatgcatcggagaaaatgctcactataactggatgtgatggtgagaactatgtggaaggtgtgcagagagatgatattcggcaagtttggatcaaagatattgctgatgtaacaaataatgatgagattgatagaaaagcaagctcatctcgattcacttcttctccatctacacaaatgttaagagggattcgtgtacaattaaaaacaacaaatgatatgaaagaaggcgaagttttaatggcattgacatccgatgaaactcaatctgttatatggcttgaaggtcttgctgaattgattgggagcaaggcagttaaaagtgaaaccgatgcaatggttgaacgaatgctgaaaatggagctacgagttcgccttctcaatgtgaaactcacgaaccccgaggagaaaccagaaattccaccgatccctgacgatatcaaaagctttatttcaaagttttaagctagcgtcgacggtaccgctgtctcatcctactttcacctagttaactgcttgtcttaaaatctatgcttctctttagtatctaaaattttcctagaagcttacaagtatataaatggtctcttctcaataaaggttgtatatttattcatcttattgaatctgccatttcctcgtttttgcgagtttatataccttccaattttctttctattgtattttcaacttctaattttaattcagggaaactgctgtaccggtagaaaaaatgctcgagatggtgagcaagggcgaggaggataacatggccatcatcaaggagttcatgcgcttcaaggtgcacatggagggctccgtgaacggccacgagttcgagatcgagggcgagggcgagggccgcccctacgagggcacccagaccgccaagctgaaggtgaccaagggtggccccctgcccttcgcctgggacatcctgtcccctcagttcatgtacggctccaaggcctacgtgaagcaccccgccgacatccccgactacttgaagctgtccttccccgagggcttcaagtgggagcgcgtgatgaacttcgaggacggcggcgtggtgaccgtgacccaggactcctccctgcaggacggcgagttcatctacaaggtgaagctgcgcggcaccaacttcccctccgacggccccgtaatgcagaagaagaccatgggctgggaggcctcctccgagcggatgtaccccgaggacggcgccctgaagggcgagatcaagcagaggctgaagctgaaggacggcggccactacgacgctgaggtcaagaccacctacaaggccaagaagcccgtgcagctgcccggcgcctacaacgtcaacatcaagttggacatcacctcccacaacgaggactacaccatcgtggaacagtacgaacgcgccgagggccgccactccaccggcggcatggacgagctgtacaagtaagaattccaactgagcgccggtcgctaccattaccaacttgtctggtgtcaaaaataataggggccgctgtcatcagagtaagtttaaactgagttctactaactaacgagtaatatttaaattttcagcatctcgcgcccgtgcctctgacttctaagtccaattactcttcaacatccctacatgctctttctccctgtgctcccaccccctatttttgttattatcaaaaaaacttcttcttaatttctttgttttttagcttcttttaagtcacctctaacaatgaaattgtgtagattcaaaaatagaattaattcgtaataaaaagtcgaaaaaaattgtgctccctccccccattaataataattctatcccaaaatctacacaatgttctgtgtacacttcttatgttttttttacttctgataaattttttttgaaacatcatagaaaaaaccgcacacaaaataccttatcatatgttacgtttcagtttatgaccgcaatttttatttcttcgcacgtctgggcctctcatgacgtcaaatcatgctcatcgtgaaaaagttttggagtatttttggaatttttcaatcaagtgaaagtttatgaaattaattttcctgcttttgctttttgggggtttcccctattgtttgtcaagagtttcgaggacggcgtttttcttgctaaaatcacaagtattgatgagcacgatgcaagaaagatcggaagaaggtttgggtttgaggctcagtggaaggtgagtagaagttgataatttgaaagtggagtagtgtctatggggtttttgccttaaatgacagaatacattcccaatataccaaacataactgtttcctactagtcggccgtacgggccctttcgtctcgcgcgtttcggtgatgacggtgaaaacctctgacacatgcagctcccggagacggtcacagcttgtctgtaagcggatgccgggagcagacaagcccgtcagggcgcgtcagcgggtgttggcgggtgtcggggctggcttaactatgcggcatcagagcagattgtactgagagtgcaccatatgcggtgtgaaataccgcacagatgcgtaaggagaaaataccgcatcaggcggccttaattaagggcctcgtgatacgcctatttttataggttaatgtcatgataataatggtttcttagacgtcaggtggcacttttcggggaaatgtgcgcggaacccctatttgtttatttttctaaatacattcaaatatgtatccgctcatgagacaataaccctgataaatgcttcaataatattgaaaaaggaagagtatgagtattcaacatttccgtgtcgcccttattcccttttttgcggcattttgccttcctgtttttgctcacccagaaacgctggtgaaagtaaaagatgctgaagatcagttgggtgcacgagtgggttacatcgaactggatctcaacagcggtaagatccttgagagttttcgccccgaagaacgttttccaatgatgagcacttttaaagttctgctatgtggcgcggtattatcccgtattgacgccgggcaagagcaactcggtcgccgcatacactattctcagaatgacttggttgagtactcaccagtcacagaaaagcatcttacggatggcatgacagtaagagaattatgcagtgctgccataaccatgagtgataacactgcggccaacttacttctgacaacgatcggaggaccgaaggagctaaccgcttttttgcacaacatgggggatcatgtaactcgccttgatcgttgggaaccggagctgaatgaagccataccaaacgacgagcgtgacaccacgatgcctgtagcaatggcaacaacgttgcgcaaactattaactggcgaactacttactctagcttcccggcaacaattaatagactggatggaggcggataaagttgcaggaccacttctgcgctcggcccttccggctggctggtttattgctgataaatctggagccggtgagcgtgggtctcgcggtatcattgcagcactggggccagatggtaagccctcccgtatcgtagttatctacacgacggggagtcaggcaactatggatgaacgaaatagacagatcgctgagataggtgcctcactgattaagcattggtaactgtcagaccaagtttactcatatatactttagattgatttaaaacttcatttttaatttaaaaggatctaggtgaagatcctttttgataatctcatgaccaaaatcccttaacgtgagttttcgttccactgagcgtcagaccccgtagaaaagatcaaaggatcttcttgagatcctttttttctgcgcgtaatctgctgcttgcaaacaaaaaaaccaccgctaccagcggtggtttgtttgccggatcaagagctaccaactctttttccgaaggtaactggcttcagcagagcgcagataccaaatactgtccttctagtgtagccgtagttaggccaccacttcaagaactctgtagcaccgcctacatacctcgctctgctaatcctgttaccagtggctgctgccagtggcgataagtcgtgtcttaccgggttggactcaagacgatagttaccggataaggcgcagcggtcgggctgaacggggggttcgtgcacacagcccagcttggagcgaacgacctacaccgaactgagatacctacagcgtgagcattgagaaagcgccacgcttcccgaagggagaaaggcggacaggtatccggtaagcggcagggtcggaacaggagagcgcacgagggagcttccagggggaaacgcctggtatctttatagtcctgtcgggtttcgccacctctgacttgagcgtcgatttttgtgatgctcgtcaggggggcggagcctatggaaaaacgccagcaacgcggcctttttacggttcctggccttttgctggccttttgctcacatgttctttcctgcgttatcccctgattctgtggataaccgtattaccgcctttgagtgagctgataccgctcgccgcagccgaacgaccgagcgcagcgagtcagtgagcgaggaagcggaagagcgcccaatacgcaaaccgcctctccccgcgcgttggccgattcattaatgcagctggcacgacaggtttcccgactggaaagcgggcagtgagcgcaacgcaattaatgtgagttagctcactcattaggcaccccaggctttacactttatgcttccggctcgtatgttgtgtggaattgtgagcggataacaatttcacacaggaaacagct

SEQ ID NO: 51 - DNA, 6297 bp, synthetic construct
  source 1..6297: mol_type = other DNA
atgaccatgattacgccaagcttgcatgcattccagcatttatggaggactcacgtcgctttatttacagtttttctgatttttaataaagttttttgaacgtttttatggcaacttttgtgatcgccagaaatgccaaaagtaacatactatcgcaaaccgtgcttgctaaatttaataaaatataattcattaatttaaaaaaaaacagaaaaaagtcaattgagaaaaatcgcaagaaaaaacattattggtacttacacattcaatgtgcagttttttttgtgtatttattcccaaaaggttatcttaaaaaattacttgaagatactgttattcaatgaaggattgatgtctgaaatatacaaaagttctcatatgtcttctattattcgaacatttcactaaattttttataaatcaaatgccctctaggaatgtccaacaaatcaaaacctattacttttgttcccctggttagtctctcccaattaacaccaaagttcatctctctgtaaatccgcctacataaccatatcgatcgaacaatgatcatttttcatacgataatccggcagtttccatgtaccagttaatccgttagtataaaataacaggtagattcctcatttgacgatttaaatcatttcaacgcggccgcactgactgggccggccactgactgggcgcgcctctagaggatccatgttgtcgtttgccacagagtttttggacgatatgaagagacaactaatgtcattagggcgagatagatactcattaccgcgtacttataaacgggtttcacatgcgaaggacaaagcgagaccggagctgagaaagttcggatgggagactctgggatactcggaaagctttaatctgcctccatttagggatagtattcaaagagttgatgggaataatcttaccgtggaggagttccgccgagatttcgaaagaccgagaatcccagttattatcactggattgactgataattgggcagctaaagacaagtggacggttgagcgcctgtcgaaaaagtaccgtaaccaaaacttcaaatgcggagaggacgacaatggcaactcggtgagaatgaaaatgaagtactaccatgactacatgctcaacaataaagacgactcaccgctctacatttttgatagcagttttgcagagagacgaaagacgaaaaagttatcggaagactattcggttccaaagttcttcgaagacgatctcttccactatgcggatgataagaagagacctccacatcgatggtttgtgatgggaccagctcgttctggaactgcaattcacattgatccactcgggacaagtgcatggaattcgttgcttcaaggtcacaaacgatgggttctgattcctccgattgcaccacgtgatcttgtgaaaccgatggctcatgagaagggaaaacatccggatgaaggaatcacgtggtttcagacggtctataaacgagttcgaagtcccagttggccgaaggaatacgcaccgattgaatgtcgtcaaggaccgggagagactatgtttgtaccgtctggatggtggcatgttgttatcaatgaggaatacacaattgcagtgactcacaactattgctctgtcgagaatttgcatcttgtatggccgaaaactgtgaagggaaggcccaagttgagcaagcattgggtcaaaaggctcacagagcaacgtcccgagcttctcgaaattatcaaatcggcttctgaaatcccgctctatgatatgaacgagtcttcaagtgattcttcaagctcttcctcatcatctgacgattcttctgatgaatctgattgtgatgatagtgggcgatgtggtggacgaaaacggaagaacgacgatcgatcgaatgagtgtccggagaaaatgagcactacttattttcagaactcgctagtttaagctagcgtcgacggtaccgctgtctcatcctactttcacctagttaactgcttgtcttaaaatctatgcttctctttagtatctaaaattttcctagaagcttacaagtatataaatggtctcttctcaataaaggttgtatatttattcatcttattgaatctgccatttcctcgtttttgcgagtttatataccttccaattttctttctattgtattttcaacttctaattttaattcagggaaactgctgtaccggtagaaaaaatgctcgagatggtgagcaagggcgaggaggataacatggccatcatcaaggagttcatgcgcttcaaggtgcacatggagggctccgtgaacggccacgagttcgagatcgagggcgagggcgagggccgcccctacgagggcacccagaccgccaagctgaaggtgaccaagggtggccccctgcccttcgcctgggacatcctgtcccctcagttcatgtacggctccaaggcctacgtgaagcaccccgccgacatccccgactacttgaagctgtccttccccgagggcttcaagtgggagcgcgtgatgaacttcgaggacggcggcgtggtgaccgtgacccaggactcctccctgcaggacggcgagttcatctacaaggtgaagctgcgcggcaccaacttcccctccgacggccccgtaatgcagaagaagaccatgggctgggaggcctcctccgagcggatgtaccccgaggacggcgccctgaagggcgagatcaagcagaggctgaagctgaaggacggcggccactacgacgctgaggtcaagaccacctacaaggccaagaagcccgtgcagctgcccggcgcctacaacgtcaacatcaagttggacatcacctcccacaacgaggactacaccatcgtggaacagtacgaacgcgccgagggccgccactccaccggcggcatggacgagctgtacaagtaagaattccaactgagcgccggtcgctaccattaccaacttgtctggtgtcaaaaataataggggccgctgtcatcagagtaagtttaaactgagttctactaactaacgagtaatatttaaattttcagcatctcgcgcccgtgcctctgacttctaagtccaattactcttcaacatccctacatgctctttctccctgtgctcccaccccctatttttgttattatcaaaaaaacttcttcttaatttctttgttttttagcttcttttaagtcacctctaacaatgaaattgtgtagattcaaaaatagaattaattcgtaataaaaagtcgaaaaaaattgtgctccctccccccattaataataattctatcccaaaatctacacaatgttctgtgtacacttcttatgttttttttacttctgataaattttttttgaaacatcatagaaaaaaccgcacacaaaataccttatcatatgttacgtttcagtttatgaccgcaatttttatttcttcgcacgtctgggcctctcatgacgtcaaatcatgctcatcgtgaaaaagttttggagtatttttggaatttttcaatcaagtgaaagtttatgaaattaattttcctgcttttgctttttgggggtttcccctattgtttgtcaagagtttcgaggacggcgtttttcttgctaaaatcacaagtattgatgagcacgatgcaagaaagatcggaagaaggtttgggtttgaggctcagtggaaggtgagtagaagttgataatttgaaagtggagtagtgtctatggggtttttgccttaaatgacagaatacattcccaatataccaaacataactgtttcctactagtcggccgtacgggccctttcgtctcgcgcgtttcggtgatgacggtgaaaacctctgacacatgcagctcccggagacggtcacagcttgtctgtaagcggatgccgggagcagacaagcccgtcagggcgcgtcagcgggtgttggcgggtgtcggggctggcttaactatgcggcatcagagcagattgtactgagagtgcaccatatgcggtgtgaaataccgcacagatgcgtaaggagaaaataccgcatcaggcggccttaattaagggcctcgtgatacgcctatttttataggttaatgtcatgataataatggtttcttagacgtcaggtggcacttttcggggaaatgtgcgcggaacccctatttgtttatttttctaaatacattcaaatatgtatccgctcatgagacaataaccctgataaatgcttcaataatattgaaaaaggaagagtatgagtattcaacatttccgtgtcgcccttattcccttttttgcggcattttgccttcctgtttttgctcacccagaaacgctggtgaaagtaaaagatgctgaagatcagttgggtgcacgagtgggttacatcgaactggatctcaacagcggtaagatccttgagagttttcgccccgaagaacgttttccaatgatgagcacttttaaagttctgctatgtggcgcggtattatcccgtattgacgccgggcaagagcaactcggtcgccgcatacactattctcagaatgacttggttgagtactcaccagtcacagaaaagcatcttacggatggcatgacagtaagagaattatgcagtgctgccataaccatgagtgataacactgcggccaacttacttctgacaacgatcggaggaccgaaggagctaaccgcttttttgcacaacatgggggatcatgtaactcgccttgatcgttgggaaccggagctgaatgaagccataccaaacgacgagcgtgacaccacgatgcctgtagcaatggcaacaacgttgcgcaaactattaactggcgaactacttactctagcttcccggcaacaattaatagactggatggaggcggataaagttgcaggaccacttctgcgctcggcccttccggctggctggtttattgctgataaatctggagccggtgagcgtgggtctcgcggtatcattgcagcactggggccagatggtaagccctcccgtatcgtagttatctacacgacggggagtcaggcaactatggatgaacgaaatagacagatcgctgagataggtgcctcactgattaagcattggtaactgtcagaccaagtttactcatatatactttagattgatttaaaacttcatttttaatttaaaaggatctaggtgaagatcctttttgataatctcatgaccaaaatcccttaacgtgagttttcgttccactgagcgtcagaccccgtagaaaagatcaaaggatcttcttgagatcctttttttctgcgcgtaatctgctgcttgcaaacaaaaaaaccaccgctaccagcggtggtttgtttgccggatcaagagctaccaactctttttccgaaggtaactggcttcagcagagcgcagataccaaatactgtccttctagtgtagccgtagttaggccaccacttcaagaactctgtagcaccgcctacatacctcgctctgctaatcctgttaccagtggctgctgccagtggcgataagtcgtgtcttaccgggttggactcaagacgatagttaccggataaggcgcagcggtcgggctgaacggggggttcgtgcacacagcccagcttggagcgaacgacctacaccgaactgagatacctacagcgtgagcattgagaaagcgccacgcttcccgaagggagaaaggcggacaggtatccggtaagcggcagggtcggaacaggagagcgcacgagggagcttccagggggaaacgcctggtatctttatagtcctgtcgggtttcgccacctctgacttgagcgtcgatttttgtgatgctcgtcaggggggcggagcctatggaaaaacgccagcaacgcggcctttttacggttcctggccttttgctggccttttgctcacatgttctttcctgcgttatcccctgattctgtggataaccgtattaccgcctttgagtgagctgataccgctcgccgcagccgaacgaccgagcgcagcgagtcagtgagcgaggaagcggaagagcgcccaatacgcaaaccgcctctccccgcgcgttggccgattcattaatgcagctggcacgacaggtttcccgactggaaagcgggcagtgagcgcaacgcaattaatgtgagttagctcactcattaggcaccccaggctttacactttatgcttccggctcgtatgttgtgtggaattgtgagcggataacaatttcacacaggaaacagct

SEQ ID NO: 52 - DNA, 6161 bp, synthetic construct
  source 1..6161: mol_type = other DNA
atgaccatgattacgccaagcttgcatgcattccagcatttatggaggactcacgtcgctttatttacagtttttctgatttttaataaagttttttgaacgtttttatggcaacttttgtgatcgccagaaatgccaaaagtaacatactatcgcaaaccgtgcttgctaaatttaataaaatataattcattaatttaaaaaaaaacagaaaaaagtcaattgagaaaaatcgcaagaaaaaacattattggtacttacacattcaatgtgcagttttttttgtgtatttattcccaaaaggttatcttaaaaaattacttgaagatactgttattcaatgaaggattgatgtctgaaatatacaaaagttctcatatgtcttctattattcgaacatttcactaaattttttataaatcaaatgccctctaggaatgtccaacaaatcaaaacctattacttttgttcccctggttagtctctcccaattaacaccaaagttcatctctctgtaaatccgcctacataaccatatcgatcgaacaatgatcatttttcatacgataatccggcagtttccatgtaccagttaatccgttagtataaaataacaggtagattcctcatttgacgatttaaatcatttcaacgcggccgcactgactgggccggccactgactgggcgcgcctctagaatgttgtcgtttgccacagagtttttggacgatatgaagagacaactaatgtcattagggcgagatagatactcattaccgcgtacttataaacgggtttcacatgcgaaggacaaagcgagaccggagctgagaaagttcggatgggagactctgggatactcggaaagctttaatctgcctccatttagggatagtattcaaagagttgatgggaataatcttaccgtggaggagttccgccgagatttcgaaagaccgagaatcccagttattatcactggattgactgataattgggcagctaaagacaagtggacggttgagcgcctgtcgaaaaagtaccgtaaccaaaacttcaaatgcggagaggacgacaatggcaactcggtgagaatgaaaatgaagtactaccatgactacatgctcaacaataaagacgactcaccgctctacatttttgatagcagttttgcagagagacgaaagacgaaaaagttatcggaagactattcggttccaaagttcttcgaagacgatctcttccactatgcggatgataagaagagacctccacatcgatggtttgtgatgggaccagctcgttctggaactgcaattcacattgatccactcgggacaagtgcatggaattcgttgcttcaaggtcacaaacgatgggttctgattcctccgattgcaccacgtgatcttgtgaaaccgatggctcatgagaagggaaaacatccggatgaaggaatcacgtggtttcagacggtctataaacgagttcgaagtcccagttggccgaaggaatacgcaccgattgaatgtcgtcaaggaccgggagagactatgtttgtaccgtctggatggtggcatgttgttatcaatgaggaatacacaattgcagtgactcacaactattgctctgtcgagaatttgcatcttgtatggccgaaaactgtgaagggaaggcccaagttgagcaagcattgggtcaaaaggctcacagagcaacgtcccgagcttctcgaaattatcaaatcggcttctgaaatcccgctctatgatatgaacgagtcttcaagtgattcttcaagctcttcctcatcatctgacgattcttctgatgaatctgattgtgatgatagtgggcgatgtggtggacgaaaacggaagaacgacgatcgatcgaatgagtgtccggagaaaatgagcactacttattttcagaactcgctagttgcaccggttatggtatcgaagggagaggcagtgattaaggagtttatgcgtttcaaggttcacatggaaggatctatgaacggacacgagtttgaaatcgaaggagaaggagaaggacgcccatacgagggaactcaaactgctaagcttaaggtaagtttaaacatatatatactaactaaccctgattatttaaattttcaggttactaaaggaggaccacttccattctcttgggatatcctttctccacagttcatgtacggatctcgcgctttcaccaagcacccagctgatatcccagattactacaagcagtctttcccagaaggattcaaatgggagcgcgttatgaacttcgaagatggaggagctgttaccgttacccaagatacctcccttgaggatggaacccttatctacaaggtaagtttaaacagttcggtactaactaaccatacatatttaaattttcaggttaagcttcgcggaactaatttcccaccagatggaccagttatgcagaagaagactatgggatgggaagcttctaccgagcgcctttacccagaggatggagtccttaagggagatatcaagatggctcttcgtcttaaggatggaggacgttaccttgctgatttcaaggtaagtttaaacatgattttactaactaactaatctgatttaaattttcagactacttacaaggctaagaagccagttcagatgccaggagcttacaacgttgatcgtaagcttgatatcacctctcacaacgaggattacaccgttgttgagcaatacgagcgctctgagggacgccactctaccggaggaatggatgagctttacaagtaagaattccaactgagcgccggtcgctaccattaccaacttgtctggtgtcaaaaataataggggccgctgtcatcagagtaagtttaaactgagttctactaactaacgagtaatatttaaattttcagcatctcgcgcccgtgcctctgacttctaagtccaattactcttcaacatccctacatgctctttctccctgtgctcccaccccctatttttgttattatcaaaaaaacttcttcttaatttctttgttttttagcttcttttaagtcacctctaacaatgaaattgtgtagattcaaaaatagaattaattcgtaataaaaagtcgaaaaaaattgtgctccctccccccattaataataattctatcccaaaatctacacaatgttctgtgtacacttcttatgttttttttacttctgataaattttttttgaaacatcatagaaaaaaccgcacacaaaataccttatcatatgttacgtttcagtttatgaccgcaatttttatttcttcgcacgtctgggcctctcatgacgtcaaatcatgctcatcgtgaaaaagttttggagtatttttggaatttttcaatcaagtgaaagtttatgaaattaattttcctgcttttgctttttgggggtttcccctattgtttgtcaagagtttcgaggacggcgtttttcttgctaaaatcacaagtattgatgagcacgatgcaagaaagatcggaagaaggtttgggtttgaggctcagtggaaggtgagtagaagttgataatttgaaagtggagtagtgtctatggggtttttgccttaaatgacagaatacattcccaatataccaaacataactgtttcctactagtcggccgtacgggccctttcgtctcgcgcgtttcggtgatgacggtgaaaacctctgacacatgcagctcccggagacggtcacagcttgtctgtaagcggatgccgggagcagacaagcccgtcagggcgcgtcagcgggtgttggcgggtgtcggggctggcttaactatgcggcatcagagcagattgtactgagagtgcaccatatgcggtgtgaaataccgcacagatgcgtaaggagaaaataccgcatcaggcggccttaattaagggcctcgtgatacgcctatttttataggttaatgtcatgataataatggtttcttagacgtcaggtggcacttttcggggaaatgtgcgcggaacccctatttgtttatttttctaaatacattcaaatatgtatccgctcatgagacaataaccctgataaatgcttcaataatattgaaaaaggaagagtatgagtattcaacatttccgtgtcgcccttattcccttttttgcggcattttgccttcctgtttttgctcacccagaaacgctggtgaaagtaaaagatgctgaagatcagttgggtgcacgagtgggttacatcgaactggatctcaacagcggtaagatccttgagagttttcgccccgaagaacgttttccaatgatgagcacttttaaagttctgctatgtggcgcggtattatcccgtattgacgccgggcaagagcaactcggtcgccgcatacactattctcagaatgacttggttgagtactcaccagtcacagaaaagcatcttacggatggcatgacagtaagagaattatgcagtgctgccataaccatgagtgataacactgcggccaacttacttctgacaacgatcggaggaccgaaggagctaaccgcttttttgcacaacatgggggatcatgtaactcgccttgatcgttgggaaccggagctgaatgaagccataccaaacgacgagcgtgacaccacgatgcctgtagcaatggcaacaacgttgcgcaaactattaactggcgaactacttactctagcttcccggcaacaattaatagactggatggaggcggataaagttgcaggaccacttctgcgctcggcccttccggctggctggtttattgctgataaatctggagccggtgagcgtgggtctcgcggtatcattgcagcactggggccagatggtaagccctcccgtatcgtagttatctacacgacggggagtcaggcaactatggatgaacgaaatagacagatcgctgagataggtgcctcactgattaagcattggtaactgtcagaccaagtttactcatatatactttagattgatttaaaacttcatttttaatttaaaaggatctaggtgaagatcctttttgataatctcatgaccaaaatcccttaacgtgagttttcgttccactgagcgtcagaccccgtagaaaagatcaaaggatcttcttgagatcctttttttctgcgcgtaatctgctgcttgcaaacaaaaaaaccaccgctaccagcggtggtttgtttgccggatcaagagctaccaactctttttccgaaggtaactggcttcagcagagcgcagataccaaatactgtccttctagtgtagccgtagttaggccaccacttcaagaactctgtagcaccgcctacatacctcgctctgctaatcctgttaccagtggctgctgccagtggcgataagtcgtgtcttaccgggttggactcaagacgatagttaccggataaggcgcagcggtcgggctgaacggggggttcgtgcacacagcccagcttggagcgaacgacctacaccgaactgagatacctacagcgtgagcattgagaaagcgccacgcttcccgaagggagaaaggcggacaggtatccggtaagcggcagggtcggaacaggagagcgcacgagggagcttccagggggaaacgcctggtatctttatagtcctgtcgggtttcgccacctctgacttgagcgtcgatttttgtgatgctcgtcaggggggcggagcctatggaaaaacgccagcaacgcggcctttttacggttcctggccttttgctggccttttgctcacatgttctttcctgcgttatcccctgattctgtggataaccgtattaccgcctttgagtgagctgataccgctcgccgcagccgaacgaccgagcgcagcgagtcagtgagcgaggaagcggaagagcgcccaatacgcaaaccgcctctccccgcgcgttggccgattcattaatgcagctggcacgacaggtttcccgactggaaagcgggcagtgagcgcaacgcaattaatgtgagttagctcactcattaggcaccccaggctttacactttatgcttccggctcgtatgttgtgtggaattgtgagcggataacaatttcacacaggaaacagct

SEQ ID NO: 53 - DNA, 6035 bp, synthetic construct
  source 1..6035: mol_type = other DNA
atgaccatgattacgccaagcttgcatgccgagtcgtgacattatctctgggtttgataaatcattcagtttttacctcgaaaaagctgaaaatcgcgattttctttcggaaaaacaaccagaaaattgataatctgagtgcacataaatccgatcaaatggtgataaagagatccaaatccggcgataagttaaaacctccctctctcttttcatatcgccttcaactaaaattttcttatttccgcactctattatattgctttaagactaagatattacttccaactacatattgctcttcctaagaaacacagtttttctaaaaaattaataagtgagctgtgtccagtgtttctcaattctccaattacttcggcatggtacttcaactgaaggcttgcattgaacttttagcgagtattcattcgtttttcaaaaatacgatttctttagcaatgtgaacagaatataaaatcgaaaccctacaattttcaaaaaaaaacagtctaatttcagaaaggatccccgggatgtctgatgaaatctctatattaatacaagatagaaaaacaggtcaacgtaggaatctaacacttaatataaatataactggaaatatcgaagatctcacaaaagatgtggaaaagctcaccgaaattcccagcgatgagctggaagtggttttctgtgggaaaaagttatcaaaatcaacgattatgagggatttgtcactgacacctgcaacacaaatcatgcttctccgtccaaagttcaatagtcacaacgaaaacggtgctactactgcaaaaataacaacagattcttcaattctcggaagcttctacgtgtggtgcaaaaattgtgacgacgtcaagcgcggcaaactgcgggtttattgccaaaaatgctcgtcaacctctgttctagtcaaatctgaaccccagaactggtccgacgttctcaaaagcaagagaataccggcggtctgcgaagaatgctgtactccaggtcttttcgctgaattcaagttcaaatgtctagcctgcaacgatccggccgcagctctaactcacgtacgcggaaattggcaaatgaccgagtgctgtgtttgtgatgggaaggagaaagtgatcttcgacctcggatgcaatcatattacatgccaattctgtttcagagattatttgctaagtcaactggaacgattcggttttgtcaatcagccgccgcatggcttcaccattttctgcccctatccagggtgcaatagagtggtacaagatgtgcaccatttccacattatgggtcagacgtcgtacagcgaataccaacggaaagccaccgagcgattgattgccgtggacgacaagggtgtgacttgcccgaatgtctcgtgtgggcagagcttcttctgggagccctatgatgacgatggaagatcccagtgtccagattgttttttttcgttttgcagaaagtgcttcgaaagaaattgtgtgtgccagagcgaagacgatctcacccgaactacaattgacgcgactacaagaagatgcccaaaatgccacgtggcaaccgaacggaacggcggatgtgctcacattcactgtacctcgtgtggaatggattggtgtttcaagtgcaagacagaatggaaggaagagtgccaatgggaccattggtttaattaagctagcgtcgacggtaccgctgtctcatcctactttcacctagttaactgcttgtcttaaaatctatgcttctctttagtatctaaaattttcctagaagcttacaagtatataaatggtctcttctcaataaaggttgtatatttattcatcttattgaatctgccatttcctcgtttttgcgagtttatataccttccaattttctttctattgtattttcaacttctaattttaattcagggaaactgctgtaccggtagaaaaaatgctcgagatggtgagcaagggcgaggaggataacatggccatcatcaaggagttcatgcgcttcaaggtgcacatggagggctccgtgaacggccacgagttcgagatcgagggcgagggcgagggccgcccctacgagggcacccagaccgccaagctgaaggtgaccaagggtggccccctgcccttcgcctgggacatcctgtcccctcagttcatgtacggctccaaggcctacgtgaagcaccccgccgacatccccgactacttgaagctgtccttccccgagggcttcaagtgggagcgcgtgatgaacttcgaggacggcggcgtggtgaccgtgacccaggactcctccctgcaggacggcgagttcatctacaaggtgaagctgcgcggcaccaacttcccctccgacggccccgtaatgcagaagaagaccatgggctgggaggcctcctccgagcggatgtaccccgaggacggcgccctgaagggcgagatcaagcagaggctgaagctgaaggacggcggccactacgacgctgaggtcaagaccacctacaaggccaagaagcccgtgcagctgcccggcgcctacaacgtcaacatcaagttggacatcacctcccacaacgaggactacaccatcgtggaacagtacgaacgcgccgagggccgccactccaccggcggcatggacgagctgtacaagtaagaattccaactgagcgccggtcgctaccattaccaacttgtctggtgtcaaaaataataggggccgctgtcatcagagtaagtttaaactgagttctactaactaacgagtaatatttaaattttcagcatctcgcgcccgtgcctctgacttctaagtccaattactcttcaacatccctacatgctctttctccctgtgctcccaccccctatttttgttattatcaaaaaaacttcttcttaatttctttgttttttagcttcttttaagtcacctctaacaatgaaattgtgtagattcaaaaatagaattaattcgtaataaaaagtcgaaaaaaattgtgctccctccccccattaataataattctatcccaaaatctacacaatgttctgtgtacacttcttatgttttttttacttctgataaattttttttgaaacatcatagaaaaaaccgcacacaaaataccttatcatatgttacgtttcagtttatgaccgcaatttttatttcttcgcacgtctgggcctctcatgacgtcaaatcatgctcatcgtgaaaaagttttggagtatttttggaatttttcaatcaagtgaaagtttatgaaattaattttcctgcttttgctttttgggggtttcccctattgtttgtcaagagtttcgaggacggcgtttttcttgctaaaatcacaagtattgatgagcacgatgcaagaaagatcggaagaaggtttgggtttgaggctcagtggaaggtgagtagaagttgataatttgaaagtggagtagtgtctatggggtttttgccttaaatgacagaatacattcccaatataccaaacataactgtttcctactagtcggccgtacgggccctttcgtctcgcgcgtttcggtgatgacggtgaaaacctctgacacatgcagctcccggagacggtcacagcttgtctgtaagcggatgccgggagcagacaagcccgtcagggcgcgtcagcgggtgttggcgggtgtcggggctggcttaactatgcggcatcagagcagattgtactgagagtgcaccatatgcggtgtgaaataccgcacagatgcgtaaggagaaaataccgcatcaggcggccttaattaagggcctcgtgatacgcctatttttataggttaatgtcatgataataatggtttcttagacgtcaggtggcacttttcggggaaatgtgcgcggaacccctatttgtttatttttctaaatacattcaaatatgtatccgctcatgagacaataaccctgataaatgcttcaataatattgaaaaaggaagagtatgagtattcaacatttccgtgtcgcccttattcccttttttgcggcattttgccttcctgtttttgctcacccagaaacgctggtgaaagtaaaagatgctgaagatcagttgggtgcacgagtgggttacatcgaactggatctcaacagcggtaagatccttgagagttttcgccccgaagaacgttttccaatgatgagcacttttaaagttctgctatgtggcgcggtattatcccgtattgacgccgggcaagagcaactcggtcgccgcatacactattctcagaatgacttggttgagtactcaccagtcacagaaaagcatcttacggatggcatgacagtaagagaattatgcagtgctgccataaccatgagtgataacactgcggccaacttacttctgacaacgatcggaggaccgaaggagctaaccgcttttttgcacaacatgggggatcatgtaactcgccttgatcgttgggaaccggagctgaatgaagccataccaaacgacgagcgtgacaccacgatgcctgtagcaatggcaacaacgttgcgcaaactattaactggcgaactacttactctagcttcccggcaacaattaatagactggatggaggcggataaagttgcaggaccacttctgcgctcggcccttccggctggctggtttattgctgataaatctggagccggtgagcgtgggtctcgcggtatcattgcagcactggggccagatggtaagccctcccgtatcgtagttatctacacgacggggagtcaggcaactatggatgaacgaaatagacagatcgctgagataggtgcctcactgattaagcattggtaactgtcagaccaagtttactcatatatactttagattgatttaaaacttcatttttaatttaaaaggatctaggtgaagatcctttttgataatctcatgaccaaaatcccttaacgtgagttttcgttccactgagcgtcagaccccgtagaaaagatcaaaggatcttcttgagatcctttttttctgcgcgtaatctgctgcttgcaaacaaaaaaaccaccgctaccagcggtggtttgtttgccggatcaagagctaccaactctttttccgaaggtaactggcttcagcagagcgcagataccaaatactgtccttctagtgtagccgtagttaggccaccacttcaagaactctgtagcaccgcctacatacctcgctctgctaatcctgttaccagtggctgctgccagtggcgataagtcgtgtcttaccgggttggactcaagacgatagttaccggataaggcgcagcggtcgggctgaacggggggttcgtgcacacagcccagcttggagcgaacgacctacaccgaactgagatacctacagcgtgagcattgagaaagcgccacgcttcccgaagggagaaaggcggacaggtatccggtaagcggcagggtcggaacaggagagcgcacgagggagcttccagggggaaacgcctggtatctttatagtcctgtcgggtttcgccacctctgacttgagcgtcgatttttgtgatgctcgtcaggggggcggagcctatggaaaaacgccagcaacgcggcctttttacggttcctggccttttgctggccttttgctcacatgttctttcctgcgttatcccctgattctgtggataaccgtattaccgcctttgagtgagctgataccgctcgccgcagccgaacgaccgagcgcagcgagtcagtgagcgaggaagcggaagagcgcccaatacgcaaaccgcctctccccgcgcgttggccgattcattaatgcagctggcacgacaggtttcccgactggaaagcgggcagtgagcgcaacgcaattaatgtgagttagctcactcattaggcaccccaggctttacactttatgcttccggctcgtatgttgtgtggaattgtgagcggataacaatttcacacaggaaacagct

SEQ ID NO: 54 - DNA, 7578 bp, synthetic construct
  source 1..7578: mol_type = other DNA
atgaccatgattacgccaagcttgcatgccgagtcgtgacattatctctgggtttgataaatcattcagtttttacctcgaaaaagctgaaaatcgcgattttctttcggaaaaacaaccagaaaattgataatctgagtgcacataaatccgatcaaatggtgataaagagatccaaatccggcgataagttaaaacctccctctctcttttcatatcgccttcaactaaaattttcttatttccgcactctattatattgctttaagactaagatattacttccaactacatgttgctcttcctaagaaacacagtttttctaaaaaattaataagtgagctgtgtccagtgtttctcaattctccaattacttcggcatggtacttcaactgaaggcttgcattgaacttttagcgagtattcattcgtttttcaaaaatacgatttctttagcaatgtgaacagaatataaaatcgaaaccctacaattttcaaaaaaaaacagtctaatttcagaaaggatccccgggatgcccacagaggcaagagataataatcgacatatccatcttggtaaggcccaaaaataggcttaaaaaggcccgaaaataggcttaaaaagggccaaaaataggcttaaaaaagcccaagaatatctgaagttctgataaatcattaaaaaatgcgcaaaaaaaacgaaaagctcatctttgagaactccccgaccaatcagcgtcctcgaactccgcccacttcatctgattggttgaaaagtgggcggagcgagtcgctgattggtcgcagttctcacgccggtttaaaagctggattttcgcttttttttgtgaaatttcagcatttttttgacgaaataaccgaaaatttggtttttttttaaataattttttttcaggcaaagtcagagatccccaccaccagcatgctcaacgattttgcagtaatagaataagcacttgcaagtacaatggattctcatttcttcccagatttttgtatgaacagttccggcgttacaataatatatttttcctagcaatcgcccttcttcagcaaattcccgacgttagcccgactggaagatacacgacagccgtcccatttctgataattttatcagtttctgcactaaaagaaatattcgaagatgtgaaaagacggcgaagtgataataaagttaacgcattttctgtcgaaattcttgtcgatggacattggattgagaaacagtggaaagatgtaagcgtcggtgacttcatccgaattgacaatgacagcctattccctgctgatctacttctattggcatcatcagaacaacaaggaatggcatatattgaaacatcgaatttagacggagaaacgaatttaaaaatcaaacaagcgctggatatcacttcaacaatgacttctccggaaaaattgagccaattcgagtctgaaatcacttgtgaaccaccatcacgacatgttaatgaatttaatggaaatattgaaattaatggagttgccagacatttcggtattgatcagctgcttttgagaggtgcccgattaaaaaacactgcatggatatttggtgccgtcatctacactggacacgactcaaagctgctcatgaactcgaaaagagctccgctgaaaagtggaacaatcgatgtacagacgaattatcgaattattttcctctttttcgttctagtcgcactcgcgctaatatccgctactggatcggaaatttggaggggaaataatattccacaggcttggtatttgtcttttcttgaacacgatccaaaaggctcattcctgtggggtgtactcacgttcttcattctctacaacaatttgattccgatttcactgcaagtcacactggaagttgttcgattcttccaggcaatctacatcaacaacgatatcgaaatgtacgatgtgaatagtgattcgtgtgccatcgctagaacatcgaatttaaatgaagaactgggacaagtcaagtttataatgtcggataaaacgggcactcttacacggaatgtgatgaagtttaaacgactatcaattggatctagaaattatggaaataatgaggatgatgagtttgcagatgcaagtttaattgaagattatcgtcaaggagatgaacattcgacgagtattctggaagtgttgaaaatgatggctgtttgtcatactgttgttcccgagaacaaggatggtcagctaatctatcaatcaagtagtccagatgaagccgctttagtccgtggagccgcgtctcaatctgtatcatttcacacaagacagccacaaaaagtgatttgtaacgtgtttggtgaagacgagaccatcgaaattctcgacgttatcgatttcacatcggatcgaaaacgaatgagtgtgatagttcgagatggtgctggaggagacatcaaactatacacaaaaggcgccgatacagtaatctttgaacggttggagcacggaaaagagcaagaagaagctgtcgagtattgtacggagcatcttgaagattatgcatcttttggatatcgtacactttgtttttcgatgagacatctcacggagcaagagtattcacagtgggctccggagtacaaaaaagccattttggcaattgataatcgtgctaagctgctcgctgatgcggcggagaagcttgaaaggaatatgattttggttggagcaactgcgattgaggataagcttcaggagtgggttcccgaaacgatccaagcactgatggcagccgatattcgtgtatggatgttaactggtgataaacgtgaaactgcaattaatattgctcattcatgtgctctatgtcatacaaatacagaattattgattgtcgacaagacgacttacgaggaaacttatcagaaattggagcaatttgtggcgagagcaattgaacttgagaagcaggaaaaaggatttgcaatggttattgatggaaaatcactgcttcacgctctaactggagaagctcggaaacatttcggagatcttgctctgcgatgtcatgcagttgtatgttgtagaatgagcccgatgcaaaaagcagaagtcgttgaaatggtccgaaaattggcgaagcatgttgtgttggcaattggtgatggagcaaatgatgttgcaatgattcaggcggcgaatgttggagttggaatttcgggggaagaaggcctgcaggctgcttcggcctcggattatgctattccgagatttcattttttgaggagacttctcctggtccatggcgcatggaatcacgatcgttcagtcaaagtgatactgtactcattctacaaaaatatttgcctctacatcatcgagctgtggtttgccatgttctccgcgtggtctggacagactattttcgagagatggactattggaatgttcaatgtaatattcactgcatggccaccagtcgtactcggattgtttgatcatccagttcccgccgaacaaattatgaagtatccggcgttgtatgcaagcttccagaatcgagcatttagtatcgggaatttctcactttggattggcctagccattgtgcattcattatcgctgttcttcttgacttacgcgacaatggagcatcaagttgtctgggataatgggctcactggcggatggcttatgctcggaaattgtgcatatacgttcgtggtggccactgtctgcttcaaagccctactagaatgtgattcatggacatggcctgtagtagtcgcgtgtattggatcgattggcctttggattgtattcgttattgtatactctctagtcttcccacacattggtggaatcggtgcagatatggctggaatggctgcaattatgatgtcatcttatacgttctggcttgcacttttattcattccacttgccacgctgctatgggatttggttattaaaagtcttttcacaatcgcaatgccaacaccacgtgaacttgctgtaatgtataacaaacggacaacatcgttcaacggattcgaacggttagccagctattcatcaaacgtactcgaaaacatgcggcttttgacatcatctctacgtggcagtaccactggaagtacacgatcaagaactgcatcagaagcttcactagcacttgctgaacagacgagatacggcttcgcattttcccaagacgaaagctcggcggtcgctcaaacggaactcatcagaaatgtggattctactagagaaaaaccgactggacgaacagagacatcacaggtggcgccggcgtaactcgaggcatctgagctccgcatcggccgctgtcatcagatcgccatctcgcgcccgtgcctctgacttctaagtccaattactcttcaacatccctacatgctctttctccctgtgctcccaccccctatttttgttattatcaaaaaacttctcttaatttctttgttttttagcttcttttaagtcacctctaacaatgaaattgtgtagattcaaaaatagaattaattcgtaataaaaagtcgaaaaaaattgtgctccctccccccattaataataattctatcccaaaatctacacaatgttctgtgtacacttcttatgttttttacttctgataaatttttttgaaacatcatagaaaaaaccgcacacaaaataccttatcatatgttacgtttcagtttatgaccgcaatttttatttcttcgcacgtctgggcctctcatgacgtcaaatcatgctcatcgtgaaaaagttttggagtatttttggaatttttcaatcaagtgaaagtttatgaaattaattttcctgcttttgctttttggggtttcccctattgtttgtcaagatttcgaggacggcgtttttcttgctaaaatcacaagtattgatgagcacgatgcaagaaagatcggaagaaggtttgggtttgaggctcagtggaaggtgagtagaagttgataatttgaaagtggagtagtgtctatggggtttttgccttaaatgacagaatacattcccaatataccaaacataactgtttcctactagtcggccgtacgggccctttcgtctcgcgcgtttcggtgatgacggtgaaaacctctgacacatgcagctcccggagacggtcacagcttgtctgtaagcggatgccgggagcagacaagcccgtcagggcgcgtcagcgggtgttggcgggtgtcggggctggcttaactatgcggcatcagagcagattgtactgagagtgcaccatatgcggtgtgaaataccgcacagatgcgtaaggagaaaataccgcatcaggcggccttaagggcctcgtgatacgcctatttttataggttaatgtcatgataataatggtttcttagacgtcaggtggcacttttcggggaaatgtgcgcggaacccctatttgtttatttttctaaatacattcaaatatgtatccgctcatgagacaataaccctgataaatgcttcaataatattgaaaaaggaagagtatgagtattcaacatttccgtgtcgcccttattcccttttttgcggcattttgccttcctgtttttgctcacccagaaacgctggtgaaagtaaaagatgctgaagatcagttgggtgcacgagtgggttacatcgaactggatctcaacagcggtaagatccttgagagttttcgccccgaagaacgttttccaatgatgagcacttttaaagttctgctatgtggcgcggtattatcccgtattgacgccgggcaagagcaactcggtcgccgcatacactattctcagaatgacttggttgagtactcaccagtcacagaaaagcatcttacggatggcatgacagtaagagaattatgcagtgctgccataaccatgagtgataacactgcggccaacttacttctgacaacgatcggaggaccgaaggagctaaccgcttttttgcacaacatgggggatcatgtaactcgccttgatcgttgggaaccggagctgaatgaagccataccaaacgacgagcgtgacaccacgatgcctgtagcaatggcaacaacgttgcgcaaactattaactggcgaactacttactctagcttcccggcaacaattaatagactggatggaggcggataaagttgcaggaccacttctgcgctcggcccttccggctggctggtttattgctgataaatctggagccggtgagcgtgggtctcgcggtatcattgcagcactggggccagatggtaagccctcccgtatcgtagttatctacacgacggggagtcaggcaactatggatgaacgaaatagacagatcgctgagataggtgcctcactgattaagcattggtaactgtcagaccaagtttactcatatatactttagattgatttaaaacttcatttttaatttaaaaggatctaggtgaagatcctttttgataatctcatgaccaaaatcccttaacgtgagttttcgttccactgagcgtcagaccccgtagaaaagatcaaaggatcttcttgagatcctttttttctgcgcgtaatctgctgcttgcaaacaaaaaaaccaccgctaccagcggtggtttgtttgccggatcaagagctaccaactctttttccgaaggtaactggcttcagcagagcgcagataccaaatactgtccttctagtgtagccgtagttaggccaccacttcaagaactctgtagcaccgcctacatacctcgctctgctaatcctgttaccagtggctgctgccagtggcgataagtcgtgtcttaccgggttggactcaagacgatagttaccggataaggcgcagcggtcgggctgaacggggggttcgtgcacacagcccagcttggagcgaacgacctacaccgaactgagatacctacagcgtgagcattgagaaagcgccacgcttcccgaagggagaaaggcggacaggtatccggtaagcggcagggtcggaacaggagagcgcacgagggagcttccagggggaaacgcctggtatctttatagtcctgtcgggtttcgccacctctgacttgagcgtcgatttttgtgatgctcgtcaggggggcggagcctatggaaaaacgccagcaacgcggcctttttacggttcctggccttttgctggccttttgctcacatgttctttcctgcgttatcccctgattctgtggataaccgtattaccgcctttgagtgagctgataccgctcgccgcagccgaacgaccgagcgcagcgagtcagtgagcgaggaagcggaagagcgcccaatacgcaaaccgcctctccccgcgcgttggccgattcattaatgcagctggcacgacaggtttcccgactggaaagcgggcagtgagcgcaacgcaattaatgtgagttagctcactcattaggcaccccaggctttacactttatgcttccggctcgtatgttgtgtggaattgtgagcggataacaatttcacacaggaaacagct

SEQ ID NO: 55 - DNA, 6026 bp, synthetic construct
  source 1..6026: mol_type = other DNA
atgaccatgattacgccaagcttgcatgcattccagcatttatggaggactcacgtcgctttatttacagtttttctgatttttaataaagttttttgaacgtttttatggcaacttttgtgatcgccagaaatgccaaaagtaacatactatcgcaaaccgtgcttgctaaatttaataaaatataattcattaatttaaaaaaaaacagaaaaaagtcaattgagaaaaatcgcaagaaaaaacattattggtacttacacattcaatgtgcagttttttttgtgtatttattcccaaaaggttatcttaaaaaattacttgaagatactgttattcaatgaaggattgatgtctgaaatatacaaaagttctcatatgtcttctattattcgaacatttcactaaattttttataaatcaaatgccctctaggaatgtccaacaaatcaaaacctattacttttgttcccctggttagtctctcccaattaacaccaaagttcatctctctgtaaatccgcctacataaccatatcgatcgaacaatgatcatttttcatacgataatccggcagtttccatgtaccagttaatccgttagtataaaataacaggtagattcctcatttgacgatttaaatcatttcaacgcggccgcactgactgggccggccactgactgggcgcgcctctagaggatccccgggatgtcatcagcagtcacaagtacgtcagactcaactgcgccgggcaattcgcagactttcaaaaaaatcgccacgaagtattttttatcatgtacagctgcattagttgccgaaacggtcacatatcctctggatataacaaaaactagactacaaatcgctagaaataagtttacaaaaggagggatggtgcaagtaacatacgatatcattagaagagaaggagcaatggctttatggacaggagtagcaccagcaatcacaagacattatatctacacaggaattcgaatgggtgcttacgagcagattcgtttacttacatttaataaagaagtagaaaagtcatttccgttatggaagtctatgctttgtggtgcattttctgggcttattgctcaattcgcggctagtccgaccgatttggtgaaggttcaaatgcaaatggaaggacttcgaagattgcagaaacaacctttacgatatacaggagcaaccgattgcttcagatccctttatcgaacacaaggattttttggattgtggattggttggatgccaaattgtcagcgagcagcactgctcaatatggctgatattgctacatatgacagtgtgaagcatgggctcattgataatttcgaacttaaagataattggctaactcatgccgttgctagtgcttgtgctggacttgctgctgccattgtatcacttccatcagatgtcgttaaaactcgaatgatggatcagattcggcacgagctggacgccaaaatgatgcataagaaaaatacgcatgtggatctatacaaaggcgtcgtcgattgctacataaaaattatcaaaaacgaaggatttttctcactttacaaaggattccttccatcttatattcgaatggctccgtggtctcttaccttctgggtctcctacgaagaaatccgtaaatggaccggcgcttcaagtttctaggctagcgtcgacggtaccgctgtctcatcctactttcacctagttaactgcttgtcttaaaatctatgcttctctttagtatctaaaattttcctagaagcttacaagtatataaatggtctcttctcaataaaggttgtatatttattcatcttattgaatctgccatttcctcgtttttgcgagtttatataccttccaattttctttctattgtattttcaacttctaattttaattcagggaaactgctgtaccggtagaaaaaatgctcgagatggtgagcaagggcgaggaggataacatggccatcatcaaggagttcatgcgcttcaaggtgcacatggagggctccgtgaacggccacgagttcgagatcgagggcgagggcgagggccgcccctacgagggcacccagaccgccaagctgaaggtgaccaagggtggccccctgcccttcgcctgggacatcctgtcccctcagttcatgtacggctccaaggcctacgtgaagcaccccgccgacatccccgactacttgaagctgtccttccccgagggcttcaagtgggagcgcgtgatgaacttcgaggacggcggcgtggtgaccgtgacccaggactcctccctgcaggacggcgagttcatctacaaggtgaagctgcgcggcaccaacttcccctccgacggccccgtaatgcagaagaagaccatgggctgggaggcctcctccgagcggatgtaccccgaggacggcgccctgaagggcgagatcaagcagaggctgaagctgaaggacggcggccactacgacgctgaggtcaagaccacctacaaggccaagaagcccgtgcagctgcccggcgcctacaacgtcaacatcaagttggacatcacctcccacaacgaggactacaccatcgtggaacagtacgaacgcgccgagggccgccactccaccggcggcatggacgagctgtacaagtaagaattccaactgagcgccggtcgctaccattaccaacttgtctggtgtcaaaaataataggggccgctgtcatcagagtaagtttaaactgagttctactaactaacgagtaatatttaaattttcagcatctcgcgcccgtgcctctgacttctaagtccaattactcttcaacatccctacatgctctttctccctgtgctcccaccccctatttttgttattatcaaaaaaacttcttcttaatttctttgttttttagcttcttttaagtcacctctaacaatgaaattgtgtagattcaaaaatagaattaattcgtaataaaaagtcgaaaaaaattgtgctccctccccccattaataataattctatcccaaaatctacacaatgttctgtgtacacttcttatgttttttttacttctgataaattttttttgaaacatcatagaaaaaaccgcacacaaaataccttatcatatgttacgtttcagtttatgaccgcaatttttatttcttcgcacgtctgggcctctcatgacgtcaaatcatgctcatcgtgaaaaagttttggagtatttttggaatttttcaatcaagtgaaagtttatgaaattaattttcctgcttttgctttttgggggtttcccctattgtttgtcaagagtttcgaggacggcgtttttcttgctaaaatcacaagtattgatgagcacgatgcaagaaagatcggaagaaggtttgggtttgaggctcagtggaaggtgagtagaagttgataatttgaaagtggagtagtgtctatggggtttttgccttaaatgacagaatacattcccaatataccaaacataactgtttcctactagtcggccgtacgggccctttcgtctcgcgcgtttcggtgatgacggtgaaaacctctgacacatgcagctcccggagacggtcacagcttgtctgtaagcggatgccgggagcagacaagcccgtcagggcgcgtcagcgggtgttggcgggtgtcggggctggcttaactatgcggcatcagagcagattgtactgagagtgcaccatatgcggtgtgaaataccgcacagatgcgtaaggagaaaataccgcatcaggcggccttaattaagggcctcgtgatacgcctatttttataggttaatgtcatgataataatggtttcttagacgtcaggtggcacttttcggggaaatgtgcgcggaacccctatttgtttatttttctaaatacattcaaatatgtatccgctcatgagacaataaccctgataaatgcttcaataatattgaaaaaggaagagtatgagtattcaacatttccgtgtcgcccttattcccttttttgcggcattttgccttcctgtttttgctcacccagaaacgctggtgaaagtaaaagatgctgaagatcagttgggtgcacgagtgggttacatcgaactggatctcaacagcggtaagatccttgagagttttcgccccgaagaacgttttccaatgatgagcacttttaaagttctgctatgtggcgcggtattatcccgtattgacgccgggcaagagcaactcggtcgccgcatacactattctcagaatgacttggttgagtactcaccagtcacagaaaagcatcttacggatggcatgacagtaagagaattatgcagtgctgccataaccatgagtgataacactgcggccaacttacttctgacaacgatcggaggaccgaaggagctaaccgcttttttgcacaacatgggggatcatgtaactcgccttgatcgttgggaaccggagctgaatgaagccataccaaacgacgagcgtgacaccacgatgcctgtagcaatggcaacaacgttgcgcaaactattaactggcgaactacttactctagcttcccggcaacaattaatagactggatggaggcggataaagttgcaggaccacttctgcgctcggcccttccggctggctggtttattgctgataaatctggagccggtgagcgtgggtctcgcggtatcattgcagcactggggccagatggtaagccctcccgtatcgtagttatctacacgacggggagtcaggcaactatggatgaacgaaatagacagatcgctgagataggtgcctcactgattaagcattggtaactgtcagaccaagtttactcatatatactttagattgatttaaaacttcatttttaatttaaaaggatctaggtgaagatcctttttgataatctcatgaccaaaatcccttaacgtgagttttcgttccactgagcgtcagaccccgtagaaaagatcaaaggatcttcttgagatcctttttttctgcgcgtaatctgctgcttgcaaacaaaaaaaccaccgctaccagcggtggtttgtttgccggatcaagagctaccaactctttttccgaaggtaactggcttcagcagagcgcagataccaaatactgtccttctagtgtagccgtagttaggccaccacttcaagaactctgtagcaccgcctacatacctcgctctgctaatcctgttaccagtggctgctgccagtggcgataagtcgtgtcttaccgggttggactcaagacgatagttaccggataaggcgcagcggtcgggctgaacggggggttcgtgcacacagcccagcttggagcgaacgacctacaccgaactgagatacctacagcgtgagcattgagaaagcgccacgcttcccgaagggagaaaggcggacaggtatccggtaagcggcagggtcggaacaggagagcgcacgagggagcttccagggggaaacgcctggtatctttatagtcctgtcgggtttcgccacctctgacttgagcgtcgatttttgtgatgctcgtcaggggggcggagcctatggaaaaacgccagcaacgcggcctttttacggttcctggccttttgctggccttttgctcacatgttctttcctgcgttatcccctgattctgtggataaccgtattaccgcctttgagtgagctgataccgctcgccgcagccgaacgaccgagcgcagcgagtcagtgagcgaggaagcggaagagcgcccaatacgcaaaccgcctctccccgcgcgttggccgattcattaatgcagctggcacgacaggtttcccgactggaaagcgggcagtgagcgcaacgcaattaatgtgagttagctcactcattaggcaccccaggctttacactttatgcttccggctcgtatgttgtgtggaattgtgagcggataacaatttcacacaggaaacagct

SEQ ID NO: 56 - DNA, 6079 bp, synthetic construct
  source 1..6079: mol_type = other DNA
gcactgactgggccggccactgactgggcgcgcctctagaggatccccgggattggccaaaggacccaaaggtatgtttcgaatgatactaacataacatagaacattttcaggaggacccttggctagcgtcgacggtaccatggtattgatatctgagctccgcatcggccgctgtcatcagatcgccatctcgcgcccgtgcctctgacttctaagtccaattactcttcaacatccctacatgctctttctccctgtgctcccaccccctatttttgttattatcaaaaaaacttcttcttaatttctttgttttttagcttcttttaagtcacctctaacaatgaaattgtgtagattcaaaaatagaattaattcgtaataaaaagtcgaaaaaaattgtgctccctccccccattaataataattctatcccaaaatctacacaatgttctgtgtacacttcttatgttttttttacttctgataaattttttttgaaacatcatagaaaaaaccgcacacaaaataccttatcatatgttacgtttcagtttatgaccgcaatttttatttcttcgcacgtctgggcctctcatgacgtcaaatcatgctcatcgtgaaaaagttttggagtatttttggaatttttcaatcaagtgaaagtttatgaaattaattttcctgcttttgctttttgggggtttcccctattgtttgtcaagagtttcgaggacggcgtttttcttgctaaaatcacaagtattgatgagcacgatgcaagaaagatcggaagaaggtttgggtttgaggctcagtggaaggtgagtagaagttgataatttgaaagtggagtagtgtctatggggtttttgccttaaatgacagaatacattcccaatataccaaacataactgtttcctactagtcggccgtacgggccctttcgtctcgcgcgtttcggtgatgacggtgaaaacctctgacacatgcagctcccggagacggtcacagcttgtctgtaagcggatgccgggagcagacaagcccgtcagggcgcgtcagcgggtgttggcgggtgtcggggctggcttaactatgcggcatcagagcagattgtactgagagtgcaccatatgcggtgtgaaataccgcacagatgcgtaaggagaaaataccgcatcaggcggccttaattaagggcctcgtgatacgcctatttttataggttaatgtcatgataataatggtttcttagacgtcaggtggcacttttcggggaaatgtgcgcggaacccctatttgtttatttttctaaatacattcaaatatgtatccgctcatgagacaataaccctgataaatgcttcaataatattgaaaaaggaagagtatgagtattcaacatttccgtgtcgcccttattcccttttttgcggcattttgccttcctgtttttgctcacccagaaacgctggtgaaagtaaaagatgctgaagatcagttgggtgcacgagtgggttacatcgaactggatctcaacagcggtaagatccttgagagttttcgccccgaagaacgttttccaatgatgagcacttttaaagttctgctatgtggcgcggtattatcccgtattgacgccgggcaagagcaactcggtcgccgcatacactattctcagaatgacttggttgagtactcaccagtcacagaaaagcatcttacggatggcatgacagtaagagaattatgcagtgctgccataaccatgagtgataacactgcggccaacttacttctgacaacgatcggaggaccgaaggagctaaccgcttttttgcacaacatgggggatcatgtaactcgccttgatcgttgggaaccggagctgaatgaagccataccaaacgacgagcgtgacaccacgatgcctgtagcaatggcaacaacgttgcgcaaactattaactggcgaactacttactctagcttcccggcaacaattaatagactggatggaggcggataaagttgcaggaccacttctgcgctcggcccttccggctggctggtttattgctgataaatctggagccggtgagcgtgggtctcgcggtatcattgcagcactggggccagatggtaagccctcccgtatcgtagttatctacacgacggggagtcaggcaactatggatgaacgaaatagacagatcgctgagataggtgcctcactgattaagcattggtaactgtcagaccaagtttactcatatatactttagattgatttaaaacttcatttttaatttaaaaggatctaggtgaagatcctttttgataatctcatgaccaaaatcccttaacgtgagttttcgttccactgagcgtcagaccccgtagaaaagatcaaaggatcttcttgagatcctttttttctgcgcgtaatctgctgcttgcaaacaaaaaaaccaccgctaccagcggtggtttgtttgccggatcaagagctaccaactctttttccgaaggtaactggcttcagcagagcgcagataccaaatactgtccttctagtgtagccgtagttaggccaccacttcaagaactctgtagcaccgcctacatacctcgctctgctaatcctgttaccagtggctgctgccagtggcgataagtcgtgtcttaccgggttggactcaagacgatagttaccggataaggcgcagcggtcgggctgaacggggggttcgtgcacacagcccagcttggagcgaacgacctacaccgaactgagatacctacagcgtgagcattgagaaagcgccacgcttcccgaagggagaaaggcggacaggtatccggtaagcggcagggtcggaacaggagagcgcacgagggagcttccagggggaaacgcctggtatctttatagtcctgtcgggtttcgccacctctgacttgagcgtcgatttttgtgatgctcgtcaggggggcggagcctatggaaaaacgccagcaacgcggcctttttacggttcctggccttttgctggccttttgctcacatgttctttcctgcgttatcccctgattctgtggataaccgtattaccgcctttgagtgagctgataccgctcgccgcagccgaacgaccgagcgcagcgagtcagtgagcgaggaagcggaagagcgcccaatacgcaaaccgcctctccccgcgcgttggccgattcattaatgcagctggcacgacaggtttcccgactggaaagcgggcagtgagcgcaacgcaattaatgtgagttagctcactcattaggcaccccaggctttacactttatgcttccggctcgtatgttgtgtggaattgtgagcggataacaatttcacacaggaaacagctatgaccatgattacgccaagcttgcatgcattccagcatttatggaggactcacgtcgctttatttacagtttttctgatttttaataaagttttttgaacgtttttatggcaacttttgtgatcgccagaaatgccaaaagtaacatactatcgcaaaccgtgcttgctaaatttaataaaatataattcattaatttaaaaaaaaacagaaaaaagtcaattgagaaaaatcgcaagaaaaaacattattggtacttacacattcaatgtgcagttttttttgtgtatttattcccaaaaggttatcttaaaaaattacttgaagatactgttattcaatgaaggattgatgtctgaaatatacaaaagttctcatatgtcttctattattcgaacatttcactaaattttttataaatcaaatgccctctaggaatgtccaacaaatcaaaacctattacttttgttcccctggttagtctctcccaattaacaccaaagttcatctctctgtaaatccgcctacataaccatatcgatcgaacaatgatcatttttcatacgataatccggcagtttccatgtaccagttaatccgttagtataaaataacaggtagattcctcatttgacgatttaaatcatttcaacgcatggtctccgagctcattaacgaaaacatgcatatgaagctctacatggagggaaccgtcaacaaccaccacttcaagtgcacctccgagggagagggaaagccatacgagggaacccaaaccatgcgtatcaaggccgtcgagggaggaccactcccattcgccttcgacatcctcgccacctccttcatgtacggatccaaggtaagtttaaacatatatatactaactaaccctgattatttaaattttcagaccttcatcaaccacacccaaggaatcccagacttcttcaagcaatccttcccagagggattcacctgggagcgtgtcaccacctacgaggacggaggagtcctcaccgccacccaagacacctccctccaagacggatgcctcatctacaacgtcaaggtaagtttaaacagttcggtactaactaaccatacatatttaaattttcagatccgtggagtcaacttcccatccaacggaccagtcatgcaaaagaagaccctcggatgggaggcctccaccgagaccctctacccagccgacggaggacttgagggacgtgccgacatggccctcaagctcgtcggaggaggacacctcatctgcaacctcaaggtaagtttaaacatgattttactaactaactaatctgatttaaattttcagaccacctaccgttccaagaagccagccaagaacctcaagatgccaggagtctactacgtcgaccgtcgtcttgagcgtatcaaggaggccgacaaggagacctacgtcgagcaacacgaggtcgccgtcgcccgttactgcgacctcccatccaagctcggacaccgtatgtctgatgaaatctctatattaatacaagatagaaaaacaggtcaacgtaggaatctaacacttaatataaatataactggaaatatcgaagatctcacaaaagatgtggaaaagctcaccgaaattcccagcgatgagctggaagtggttttctgtgggaaaaagttatcaaaatcaacgattatgagggatttgtcactgacacctgcaacacaaatcatgcttctccgtccaaagttcaatagtcacaacgaaaacggtgctactactgcaaaaataacaacagattcttcaattctcggaagcttctacgtgtggtgcaaaaattgtgacgacgtcaagcgcggcaaactgcgggtttattgccaaaaatgctcgtcaacctctgttctagtcaaatctgaaccccagaactggtccgacgttctcaaaagcaagagaataccggcggtctgcgaagaatgctgtactccaggtcttttcgctgaattcaagttcaaatgtctagcctgcaacgatccggccgcagctctaactcacgtacgcggaaattggcaaatgaccgagtgctgtgtttgtgatgggaaggagaaagtgatcttcgacctcggatgcaatcatattacatgccaattctgtttcagagattatttgctaagtcaactggaacgattcggttttgtcaatcagccgccgcatggcttcaccattttctgcccctatccagggtgcaatagagtggtacaagatgtgcaccatttccacattatgggtcagacgtcgtacagcgaataccaacggaaagccaccgagcgattgattgccgtggacgacaagggtgtgacttgcccgaatgtctcgtgtgggcagagcttcttctgggagccctatgatgacgatggaagatcccagtgtccagattgttttttttcgttttgcagaaagtgcttcgaaagaaattgtgtgtgccagagcgaagacgatctcacccgaactacaattgacgcgactacaagaagatgcccaaaatgccacgtggcaaccgaacggaacggcggatgtgctcacattcactgtacctcgtgtggaatggattggtgtttcaagtgcaagacagaatggaaggaagagtgtcaatgggaccattggtttaattaa

SEQ ID NO: 57 - DNA, 6923 bp, synthetic construct
  source 1..6923: mol_type = other DNA
atgaccatgattacgccaagcttgcatgccgagtcgtgacattatctctgggtttgataaatcattcagtttttacctcgaaaaagctgaaaatcgcgattttctttcggaaaaacaaccagaaaattgataatctgagtgcacataaatccgatcaaatggtgataaagagatccaaatccggcgataagttaaaacctccctctctcttttcatatcgccttcaactaaaattttcttatttccgcactctattatattgctttaagactaagatattacttccaactacatgttgctcttcctaagaaacacagtttttctaaaaaattaataagtgagctgtgtccagtgtttctcaattctccaattacttcggcatggtacttcaactgaaggcttgcattgaacttttagcgagtattcattcgtttttcaaaaatacgatttctttagcaatgtgaacagaatataaaatcgaaaccctacaattttcaaaaaaaaacagtctaatttcagaaaggatccatgtctatgaaacgattcggaaaagcagcatatcgaatcgcaaatgagttagttgcaaaaggtggacgactaccaattttccaacgcttcctgccgagaatatttcccgccacttataatttaggagttcatgtcgtactcaaaaaggctccatttccacgacaaaatgctctacgaattgctcgccttgtaactcgccacggtcgagttttccggccattttcctcagtaataatcgaaagacatcgatttcaaaatcaaaatgattggcgtcgaaagtttcaaccgattcgtaaagaattgccaagaaatgtggatttagtcgaacgaatcaggcagatatttggcaattctctacgatacaatgaggatttgaaaagcactgaatggccgaatagaattgattcttatgagtttggggaatttctcggtcaaggatgcaatgcagcagtttactctgcgagattagccaattctgatgcagaatcctcagggaatactcactatggtgcagggtttaatgaagtcacaaatatacttgcagaaattccgccagttagcaaagttgcacaaaagaaattcccgttggcaatcaaattaatgtttaattttgaacatgatcgcgatggagatgctcatctcttgaaatcaatgggaaatgagttggctccatatccgaatgctgcaaagttgctcaatggacaaatgggaacatttagacctcttccagcaaaacatccaaatgttgttcggattcagacagcttttattgattcgttaaaagttttgccagatgcgattgaacgatatccagatgcccttcacactgcacgttggtatgagtcaattgcctccgaaccgaaaacaatgtacgtagtaatgagacgataccgacaaacacttcatgaatatgtatggactcgtcatcgaaattattggacaggacgagtgataattgctcaactattagaagcatgtacatatcttcataagcataaagttgctcagcgagacatgaaaagtgataatattcttctggaatatgattttgacgacgagattccccaattagttgtcgccgattttggatgtgcacttgcatgtgacaattggcaagtagactatgaatcagatgaagttagtcttggaggaaatgccaagacaaaagcaccagaaattgcgacggctgttcctggaaagaatgtaaaagtaaacttcgaaatggcagatacatgggcagctggaggcctttcttatgaagttctaacacgatcaaatccattctacaaacttcttgatactgcaacataccaggaatcagaactaccagcactcccatctcgtgtcaattttgtggcacgagatgtcatttttgacctactcaagcgagatcctaatgaaagagtcaagccgaatattgctgcaaatgcgttgaatttgtcattgttcagaatgggagaagatgtgaagcagatgatggaaaaatgtggaatatctcaaatgactactctattggctggaagttctaaagttttgagtcaaaaaatcaatagtcgtctggacaaagtgatgaatctgattactgctgaaactatcatggccaacctagctccacatttgattagtcgagcagaacgacaacttcgagcaacatttctttcaagaatgaatcgagaagatatttggagaagtcttcaatatttcttcccagctggtgttcaacttgacacacctgccacatcatcagactgtttggagactatttccagtttgatgtcgagtttttcaaatgattcagaaaattacgagaagcaacagaaaccggctaaaaatggatacaacaatgttccacttcttctcagaaatgttatccgtacagatgcggatggaatcaatggaattgtacatagagttcgatctaaataggtaccggctgtctcatcctactttcacctagttaactgcttgtcttaaaatctatgcttctctttagtatctaaaattttcctagaagcttacaagtatataaatggtctcttctcaataaaggttgtatatttattcatcttattgaatctgccatttcctcgtttttgcgagtttatataccttccaattttctttctattgtattttcaacttctaattttaattcagggaaactgctgtaccggtagaaaaaatggtctccgagctcattaacgaaaacatgcatatgaagctctacatggagggaaccgtcaacaaccaccacttcaagtgcacctccgagggagagggaaagccatacgagggaacccaaaccatgcgtatcaaggccgtcgagggaggaccactcccattcgccttcgacatcctcgccacctccttcatgtacggatccaaggtaagtttaaacatatatatactaactaaccctgattatttaaattttcagaccttcatcaaccacacccaaggaatcccagacttcttcaagcaatccttcccagagggattcacctgggagcgtgtcaccacctacgaggacggaggagtcctcaccgccacccaagacacctccctccaagacggatgcctcatctacaacgtcaaggtaagtttaaacagttcggtactaactaaccatacatatttaaattttcagatccgtggagtcaacttcccatccaacggaccagtcatgcaaaagaagaccctcggatgggaggcctccaccgagaccctctacccagccgacggaggacttgagggacgtgccgacatggccctcaagctcgtcggaggaggacacctcatctgcaacctcaaggtaagtttaaacatgattttactaactaactaatctgatttaaattttcagaccacctaccgttccaagaagccagccaagaacctcaagatgccaggagtctactacgtcgaccgtcgtcttgagcgtatcaaggaggccgacaaggagacctacgtcgagcaacacgaggtcgccgtcgcccgttactgcgacctcccatccaagctcggacaccgttagcattcgtagaattccaactgagcgccggtcgctaccattaccaacttgtctggtgtcaaaaataataggggccgctgtcatcagagtaagtttaaactgagttctactaactaacgagtaatatttaaattttcagcatctcgcgcccgtgcctctgacttctaagtccaattactcttcaacatccctacatgctctttctccctgtgctcccaccccctatttttgttattatcaaaaaaacttcttcttaatttctttgttttttagcttcttttaagtcacctctaacaatgaaattgtgtagattcaaaaatagaattaattcgtaataaaaagtcgaaaaaaattgtgctccctccccccattaataataattctatcccaaaatctacacaatgttctgtgtacacttcttatgttttttttacttctgataaattttttttgaaacatcatagaaaaaaccgcacacaaaataccttatcatatgttacgtttcagtttatgaccgcaatttttatttcttcgcacgtctgggcctctcatgacgtcaaatcatgctcatcgtgaaaaagttttggagtatttttggaatttttcaatcaagtgaaagtttatgaaattaattttcctgcttttgctttttgggggtttcccctattgtttgtcaagagtttcgaggacggcgtttttcttgctaaaatcacaagtattgatgagcacgatgcaagaaagatcggaagaaggtttgggtttgaggctcagtggaaggtgagtagaagttgataatttgaaagtggagtagtgtctatggggtttttgccttaaatgacagaatacattcccaatataccaaacataactgtttcctactagtcggccgtacgggccctttcgtctcgcgcgtttcggtgatgacggtgaaaacctctgacacatgcagctcccggagacggtcacagcttgtctgtaagcggatgccgggagcagacaagcccgtcagggcgcgtcagcgggtgttggcgggtgtcggggctggcttaactatgcggcatcagagcagattgtactgagagtgcaccatatgcggtgtgaaataccgcacagatgcgtaaggagaaaataccgcatcaggcggccttaattaagggcctcgtgatacgcctatttttataggttaatgtcatgataataatggtttcttagacgtcaggtggcacttttcggggaaatgtgcgcggaacccctatttgtttatttttctaaatacattcaaatatgtatccgctcatgagacaataaccctgataaatgcttcaataatattgaaaaaggaagagtatgagtattcaacatttccgtgtcgcccttattcccttttttgcggcattttgccttcctgtttttgctcacccagaaacgctggtgaaagtaaaagatgctgaagatcagttgggtgcacgagtgggttacatcgaactggatctcaacagcggtaagatccttgagagttttcgccccgaagaacgttttccaatgatgagcacttttaaagttctgctatgtggcgcggtattatcccgtattgacgccgggcaagagcaactcggtcgccgcatacactattctcagaatgacttggttgagtactcaccagtcacagaaaagcatcttacggatggcatgacagtaagagaattatgcagtgctgccataaccatgagtgataacactgcggccaacttacttctgacaacgatcggaggaccgaaggagctaaccgcttttttgcacaacatgggggatcatgtaactcgccttgatcgttgggaaccggagctgaatgaagccataccaaacgacgagcgtgacaccacgatgcctgtagcaatggcaacaacgttgcgcaaactattaactggcgaactacttactctagcttcccggcaacaattaatagactggatggaggcggataaagttgcaggaccacttctgcgctcggcccttccggctggctggtttattgctgataaatctggagccggtgagcgtgggtctcgcggtatcattgcagcactggggccagatggtaagccctcccgtatcgtagttatctacacgacggggagtcaggcaactatggatgaacgaaatagacagatcgctgagataggtgcctcactgattaagcattggtaactgtcagaccaagtttactcatatatactttagattgatttaaaacttcatttttaatttaaaaggatctaggtgaagatcctttttgataatctcatgaccaaaatcccttaacgtgagttttcgttccactgagcgtcagaccccgtagaaaagatcaaaggatcttcttgagatcctttttttctgcgcgtaatctgctgcttgcaaacaaaaaaaccaccgctaccagcggtggtttgtttgccggatcaagagctaccaactctttttccgaaggtaactggcttcagcagagcgcagataccaaatactgtccttctagtgtagccgtagttaggccaccacttcaagaactctgtagcaccgcctacatacctcgctctgctaatcctgttaccagtggctgctgccagtggcgataagtcgtgtcttaccgggttggactcaagacgatagttaccggataaggcgcagcggtcgggctgaacggggggttcgtgcacacagcccagcttggagcgaacgacctacaccgaactgagatacctacagcgtgagcattgagaaagcgccacgcttcccgaagggagaaaggcggacaggtatccggtaagcggcagggtcggaacaggagagcgcacgagggagcttccagggggaaacgcctggtatctttatagtcctgtcgggtttcgccacctctgacttgagcgtcgatttttgtgatgctcgtcaggggggcggagcctatggaaaaacgccagcaacgcggcctttttacggttcctggccttttgctggccttttgctcacatgttctttcctgcgttatcccctgattctgtggataaccgtattaccgcctttgagtgagctgataccgctcgccgcagccgaacgaccgagcgcagcgagtcagtgagcgaggaagcggaagagcgcccaatacgcaaaccgcctctccccgcgcgttggccgattcattaatgcagctggcacgacaggtttcccgactggaaagcgggcagtgagcgcaacgcaattaatgtgagttagctcactcattaggcaccccaggctttacactttatgcttccggctcgtatgttgtgtggaattgtgagcggataacaatttcacacaggaaacagct

SEQ ID NO: 58 - skipped
